United States Patent Application Publication US 2025/0205292 A1 - sequence listing, part 13

SEQ ID NO: 20 - DNA, 2250171 bp, Bifidobacterium longum
  source 1..2250171: mol_type = genomic DNA
atggttaacgcttccggcgaccccgtaatcgaggccgcccacatctggtcagacacgctgacggtgctcaaacacagcgcttcgctcagcccacgagaaaaaggctggttggaaggcgttgttcctgaaggcgtcttcggttcgaccatcgtgctgtgtgtggacaacaacgacacgcttcaagccattcagggtgatttgaacgattccctgcttcaggcattgcgtacggtaaccggcgaaaatatgtttcccgcgttcaaggtcgtgccgaaaaccgagcccgaaccgctttcggaggcaaagccggcgcagccatatccttcggaaatttctccgactgtcgccgaattcggtaaagaatcctatggtgcaaagccggcagccgcaccgcgggaaccgatgcccgccaccgagccgcagttcccggtcggtcagcagaagatgaatcgcgatcccgagactcatctcaataagaacttcacgtttgattccttcgtgcccggcgattccaaccgttttgcccgtacggtcgcactggccgtggccgaaggttccgggcaggatttcaacccgttgtgtatctatggcggatcgggcctgggcaaaacccacttgctgaacgccatcggcaactatgcactggtcaaggatcccgggctgaaggttcgatacgtcacgtctgaggaattcacgaacgaattcattgacgcgctgcaaaacccgaaccaaagccagggtcagattgctgaattcaaccgtcgataccgacaggttgatgtgttgcttattgacgatatccagttcctcggcggcaaggaagccaccttggatcagttcttccatacgttcaatgcactgcatcaggcaaataagcgtattgtcattgcttccgatgtagcgcccaagaatttgaagggtttcgaggctcgactcatctcgcgcttcgaatccggcctgaccgtagacgtcaagccgccggatctggagacccgaatcgccattcttcgcatgatcgcctcgatgaacggctcgaaaatccccagcgatgtgttggacctcatcgccgaacgcttcaccgagaacattcgtgaactcgaaggcgcgctaacccgtgttacggccgtggcctcgctgagtaatcagccggtgacccgcgccttggccgagcagacgttgcaggacttcttcaccaccgatgtggaaatcaagcccacggacatcatcagtcaggtggcgaagtacttccacctgacgtttgaggatcttgtcggtaaatcacgaaccaaaaacgtggctgttcctcgtcagatcgccatgtatctggctcgcgaaatgaccagtatgagcctgatggatattggccaggtctttggcggacgcgatcacaccacagtaatgcatgcctgcactcgaatcagtgaccgaatgcagcaaaaacaggagatctataactacgttatggagctcacggttcgcctcaagcaaagcaacaccaactgacacaacgcttctgagagacgaaaaacggcacttttcggactgactttccgaaaagtgccgtttttggttgctcaggcggattctggtggatacgtcgaggcaacggattcgagacattagattcctcatggctcccctttgtgaggggatctgtcggcgcagacgactgaggggagtttcgaaggggaacacgcaaaaaaaccatgaaacgagagaatcgattctgaggaccgattttgcgggtttgagcgagcgagacggaaaaagtgccgaaaacggtctccagaatcgattctcctcgacgaaaaacagccttcaacacgccgtgcgaaagtgcgaaaaccaaaaaagttatccacatagttgtgcacagatgtgggtaaactcggcggataactcgtggattacccactattttgttgtggaaaactcgtgcataaccgcgacctcgatgtggaaaactcaaattcgacgaactggctgtgggaaactcgcccacttatccacaagccatgcagattttgtccacaattttcagggacttatgaaccgttgcagttgtagggctcagccctacttatccacactatccaccggccttattatgacgattacttactcagttacgtgaaaagcatcatcgccatagtaacagccggtcatccagagtacgtaagttcgtcacccaacggctagaatatttctcagccaatccgacgaagggaacaatcacacatgaaagtcgaaatcgataccgcagccctggccgacgccgtagcctggacctcccgagtcatcgacgcacgtccctccaacccgattctcgctggcgtcaagctggaagccattgacggaacgctgcaattctccgccttcaactacgagatttccgctcgccaccacatcgaagccggcgttgacgaagccggttccgtactggttcagggcaagctgctggccgatatcaccaaatcgctgcgttcggagaaaacgtacctggtcaccgacggctccacgctgaccatcacgtccggcaagtcgaagttcaccttgcagctcatgcccgacaccgagtacccggatctgcccgtggtaccggccatgctcggccaagtcgatgccccgactttcgttcaggccgtgaaccaggcgtgcgttgcagtctcccgcgaagaaaaccgcccggtactgaccggcgttcgcatgcaattccaaggcgacaaggtcgtcatgacctccaccgatcgcttccgtttggcccgcgccaccttcacttggactccgcagaacccggacgtcgacaccaccacgctggttcgcggctccctgctcaaggatgtggcccgtgctcttgacgagcaccagaacatccgccttgatttcgatgccgatagcccgacgctgctcggcttcgaaaacgccggccgcgtctccacctcccagctcatcgacggtgaattcccggcggtcgaccgcctgttcgccgacgaatatccgattcaggccgtagtcaacaagcaggatttgctcgacgccatcagccgtgtggctttggtcgccgaacgcaatgctccgattcgcatgaccttcaccggtcaggaagtggcgctgtccgccggatcggtcgacgaggctcaggccaacgaaacactggacatcgacatggatggcgacgacatcaccgtggcattcaacccgtcctacctgaaggagggtctgtccgccgtaaccgaaccattcgtgcgcatcaaaatgacgaccccggtcaagccggtcgagttcaatggccagcaggaagctgattccgacgagtccatggactaccgatacctgctcgtgccgatgcgctttaacaactgaaatccctgaatttccaacgattcgctaatgcacatctcccgtctcgcactcgaccactaccgctcatggagtcaggtagtggtcgatttcgtaccaggcgtgaatatcctgttcggcaagaacggtctgggcaaaaccaatctggtggaagccgtcgaagtgctgtccaccggatcgagccatcgcacgtccagcacgttgccgctgatcgaacgcgggcagaccacggccaccatccgcgcgaacgtcgctgatgatgccggtcaaaccactacgtatgaagcgtcaattcatgcgcgtggtgccaaccgagcccgcatcaactcggggtcgtcgctgtatctgcgcgatatcatcggcaagattcccagcgtttccttcactcccgaagatcagcgattggtgtccggcgatccgggagcacgccgcaccatgatgaatcaggctgcggctctgctcgagcccggatacatgcagacgttgcaacagttcacgcgcatcgccaaacagcgtgccacattgttgaagcaattgaatgccaatgccaacaatggccagccgatggatgcggttctgagcggtttggaaatctggaccggccagttcatcgaagctggtgtggcgttgacccgtatgcgcgctcatgtgatcggtctgattgccgagccatttgccgcgatttacgccgacttggccggtgccggcgagcaggtgacgctcacatatgcgccttcattcgacgaagtgctgatgttcgacgatccgcatccgcagattagcgagcatttccaacgcatctaccccggtgaagtggctcgcggcgtgaaccttatcggtccgcagcgcgatgacatgaaccttgagttggccggtattcccgcccgcgagttcgcttcgaacggcgagatgtggacgatggcgttggccttgaaaatggcattgttcgaaatagtgcgtgaccggttgggattgcagccgattgtgattctcgatgatgtgttcgcccagcttgacgacagccggcgcacgcagattcttgatttcgccagaaaacaggatcaggtgctgattaccgtggccgctgagggcgatgtgcccgactatgaatcggcccatcgcatcgacgtggccgcactgggcgaaccagcttccgtgatattgccaactctgggcaatttgtccaattcgcgggaaaatgagagtttgggtaagtatgacggaaaacccgcggtggacagcgcgtccgtagaacggaaagtgtcatgaacccgccgatcgcccgccaactcaacctggacgagaccaaactgccggccgaaatattcgagcggctctcccgtcgcggggcgaccttgaaggactacagacgccgccgtgaagaggccatcgaaaacttcggcaaaccggggcgcgatccggctgaactgggcagcgtgatgaccaccatcgccggcaatggcgtctgggcggcgaatatgaaacttgcgcaattgcgcaaccattgggaccaagtggtggggcaggccatcgccagccattcggcagtcgccgatttcacggacggcgtactgaccatccgtgccgaatccacggtctgggccacgcagctgacctaccttatcccccaacttaccgataccatccgtcgcaatctcaaaggattgaccatcgccgagattcgcgtgaccggaccggccgccggatacacgcgcaaatgggctcggcggcggtagccaagataccaaacaaattcgcagaagcctcgctatggcgctcgtcgggttagacgagtaaaatcacatgcagtatggtcaaatggccagaagagccctttacgggcctcgtaagccatatcgcctccgtgaatgaccttcatgacggaggttgaccctgtagtcacggaaggaagcctgttggcagacgaaaccagcaaagaggagcagctgaaggcggctgcggaacgcatcaacaatgcggaattgaccgaaggcgaacttgacgaatccatggcccccgagcattatgaggcctccgatctgagggtgctcgaaggactcgaggccgtgcgtatccgccccggtatgtacatcggttccaccggcccgcgcggtttgcaccacctggtctatgagatcgtcgataactcggtcgacgaggcgctggccggatacgccagccatatcgaggtcaccattctgtcggacaacggcatccgcgtggtggacgatggtcgaggcatcccggtcgatgaggtgcctggcgagggtgtctccggtgtggagaccgtgatgaccaagctgcacgccggcggcaagttcggcggcggcggttatgcagtgtccggcggtctgcacggcgtgggtatctccgtggtcaacgcactctccacccgcgtggacatcgaagtgcgccgtcagggcttccactggacccagacgtacatcgaccagcaccccaccgcgcccttgaagcaggacgagccgatgaccgaaggcgagtccaccggtacgtccgtgactttctgggccgacccgaagatcttcgagaccaccatctacgacttcgagacgctgcgttcccgtttccagcagatggccttcctgaacaagggcctcaagatcagcctgaccgacgagcgtgagaatgaccaggccggcgacgaggtggccggcgacgccgcggacgagcccggcgcaaagcaccagaccgtcacctaccaatacctcaacggcatcaaggattacgtcgagtatctggtcaaggtgcgcaaggccacgccggtggaagaggacgtcatcagcttcgaggccgaagacttgaagctcggcatctccgccgaactcgccatgcagtggaccaccgcctactccgaggccgtgcacaccttcgcgaacacgatttccaccaccgagggcggcactcacgaggaaggcttccgcgccgcgctgacctcgctggtcaaccgttacgcgcgagacaagggcatcctcaaggacaaggacgagaacctctccggcgacgacgtgcgtgaaggcctgaccgccgtgatctccgtcaagctcaccaacccgcagttcgaaggccagaccaagaccaagctcggcaactccgaagccaagaccttcgtgcagcgcgtgatgaccgacaagctcggcgactggttcgatgcccacccggccgaggccaagaacatcatccagaaggccatcgaggcatcccgcgcccgtctggccgccaagaaggcccgcgagaacacccgccgcaagtccatcttcgagtccgccggcatgcccgacaagctcaaggactgtcagtcgaacaacccggaagagtgcgagctgttcatcgtggagggtgattccgcaggcggctccgccatccagggccgcaacccgatcacgcaggccatcctgccgctgcgaggcaagatcctcaacaccgagcgcgccagcctggaccgcatgatgaagtccgacaccatcgaatcgctgatcaccgcggtcggcggcggctacggcgaggacttcgacatctccaaggtccgctaccacaaggtcatcatcatggccgatgccgatgtggatggtgcgcatatcgccaccctgaacctgacgctgttcttccgctacatgcgcccgatgatcaccgccggctacgtgtacgtggccatgccgccgctgtaccgcctgaagtggaccaagggcccgcacgacttcgtgtacaccgacgccgagcgcgaccgcgtgctcgccgaaggcaaggccaacggacgccagctgcccaagggcgaaggcatccagcgctacaagggtttgggcgagatgagctaccaggagctgtgggagaccaccatggaccccgagcaccgcattctgaagcaggtgcacatcgaggacgccgccgcggccgacgagaccttctcgatgctgatgggcgatgaggtcgaaccccgccgcctcttcatccagcgcaacgccaagaacgtgcgttggatcgatgcgtaacggaatcctccaacctccctcgtcagagggaggtacacaacggacttagacaactaaaggaacaacagtggcagatgaaaacaacaccggcgacgagcagttcacgccggacggctcgatggagccgttgagcccgcaggaggcggacactaccgactacggcctgatggacaccggcgaacgcatccagcgcaaggacctgcagcaggagatgcgcgagtcctatctggcgtatgccctctccgtgatcgtcgagcgcgccctgccggacgtgcgcgacggtatgaagcccgtgcatcgccgcgtgatctacgcgatgtacgacggcggctaccgccccgatcgcggctacaacaagtgctcccgcgtggtcggcgacgtgatgggtaagtaccacccgcacggcgactccgccatctacgacactttggtgcgtatggcccagtcctggtcgatgcgcaacatgctcgtcgacggccagggcaacttcggctcccccggcgacgacccggccgccgccatgcgttacaccgaatgccgtatggccccgctggccatggaaatggtgcgcgacatcgacaaggacaccgtcgacttcgtgcccaactacgacggcaagacccaggagccgaccgtgctgccggcccgcttcccgaacctgctcgtcaacggctccgccggcatcgccgtcggcatggccaccaacatcccgccgcacaacatgcgcgaggtggcggacggcgtccactgggcgctcgaccacccggacgccagccgcgaggaactgctggaaaacctgatccgcatcatcaagggaccggacttccccaccggcgccaccatcctcggccacaagggcatcgaacaggcctaccgcaccggccgtggcctgatcaccatgcgtgccgtggtcaacactgaggagatcaacggccgtatgtgcctggtggtcaccgaactgccctaccaggtcaacccggaccgcctcgtcgtctccattcgtgaggccgtgcgcgacggcaagatccagggcatcgccgacatgcgcgacgagacctccggccgtaccggccagcgcctcgtgctcgtgctcaagcgcgacgccgtgccgaaggtggtcctgaacaacctgtacaagcactcccagctgcagcagaccttcggcgccaacatgctggcgctggtcgacggcgtgccgcgcacgctgagcctggacgccttcatccgccattgggtgaaccaccagctcgacgtgatcgcccgccgcaccgcgtacctgaagcgcgaggccgaagagcgcgaccacatcctgcagggctatctgaaggccctcgacatgctggacgaggtcatcgccctcatccgtgcctccgaagacaccgacaccgcacgtacgggccttatggggctgctggacatcgaccaggtgcaggcggacgccatcctggccatgcagctgcgcacgctgacccgcatgaaccgcgacaagatcgtggccgagcatgaggaattgcagcgcaagatcgccgactacatcgacatcctcgccaagccggaacgccagcgcaagatcatcggcgacgagctcgacgagatcgtcgccaagtacggcgacgaccgccgcaccaagatcctgccgttctccggcgagatgaacgtcgaagacctgatcgccgaagagaacgtggtggtcaccgtgacccactccggcttcattaagcgcaccaaggccgacgaataccgctcccagcaccgcggcggcaagggcatcaagggcaccaagctgcgcgaggacgacgtggtggatcacttcttcctgacctccacgcacaactggctgctgttcttcacgaacaagggccgcgtgtaccgcatcaaggcctacgagctgcccgagggctcgcgcgactccaagggccagcacgtggccaacctgctgcagttcgcgcctgatgagtccatccagaccgtgctgtccatcccgaactacgaggtggccaagtatctggtgctcgccacccgttccggcaaggtcaagaagaccccgctggccgagtacgattccccgcgccagggcggcctgatcgccgtgcgcctcatggccgacgagaacggcgagaacgccgacgagctcatcggcgccgcgctgtgcaacgccgaggacgacatcatcctggtctccaaactcggcatgagcctcaagttccaggccgacgacgagcagctgcgcccgatgggccgccagaccgccggcgtgcagggcatgaagttccgtaacgacgacagcctgctggccatggatgtggtccctggcgactccgacaaggacctgttcgtggtcaccaacgagggcttcgccaagcgcaccgccatcagcgaataccgtctgcagggccgcaatggcctgggtatcaaggccgtgcaactggtcgagggccgtggtgctctggtcggcgcgctcgtggtgtccgaagacgatcaggttatggccatcatgaagtccggcaaggtgattcgctccaacgtggacgaagtcaagcgcaccgggcgcaacacccagggcgtgacctttgccaagcccgacaagggcgacacgattctctccatcgcccgtaacgaggagaaggacgagcccgaggatggcggcgatgccgcggcgaacggcaccgccgagaccgcacaatccggcgagaatgtgaacaacgcggacgaggcgtgagcagcgtcctgaaaagctggtagcctcgcatacagcagaggctaccgccaagcctgttaaggagaaacgatgagcgagaatctcgaagacaacgagccccggatcataccgccggcagtcggcaatacgcagaacgagcatgtcgagccgctgatcggtactgagcacgctccccgcgtggcacgctccgtgtccagcgatccggaagaatccgcgttgccttcttcaggtgccgccactcccgtgcgtccggcacctcgccgtagcgcccccagggctcgccgcatgagcttgtcgctgacccgcgtggatgcttggtccgtggccaaggtgacgttcatgctgtccatcgccgtggcgattattcaggtcgttgcctccgcgatcgtatgggtgctgcttgatgtggtcggtgtattcagccagattacgcagattgtgtcttccaccggtcttgatgcaggcggtttcgatctcaagaacgtgttgtcccttaccaccgtggtctccggcgtcaccatcttctcgattgttgaagtggtgatcttcaccctgctggccaccattgcggcactgatctacaacgtggtcagctcgctggtcggcggcgtgcacgtcacgctcggcgacgactgatatagctatactggcagaactcccctcagtgaaccgcaccccggttgttggactgaagtaattcagattcgatgatcggaggtgcggtttcttatgtgtggggttcgtaggcgtcgttgctgggccgagacttgggactccggcgacgctgggggtggcaggcgtcggtgttgggacagattttgtatctctgacgacgctgtggagggcttaccgtcgtcagcggtacagatcttggagttctgccgacgctgagggtgcgttctgtgtcgtatgcgtccaattcttggccctctgccgacgctgggcacagcaagcgtcgttgctgggccaagttttggactgccgccgacgcagagaatgcacacagtggtgttggtctgccagcgtgtggcagcttggcgccgctgggggggggagtcatgagtcccattccaactcccccttattgaccacttaggggtgcatcccaacacatggggtgcaccccctttttttcttgttgtgctacggggttccagtcgcatttttttcggtgatattttgaacgcgaagacaggctgggaaatgcccgatagtcgtgttcccctcagcaggtgaagccctgctttcaggctgcaaaaccgactcgggtgttccgaaagcggctttcgttgttgtacatcgatacataagagagaacacccatgaaaaacaccattattcgtgctgccggtgtgctgttggctgcaagcatgatatttggcggtgcggcagccactgcatcggccgcggaagcaacgtcgccgagcaccggcaccaccagcagcacgcaagccgcggaatccatcaatcgcgaatgggtgctgaatcctgcgaacaacactgagctggcggctctcggcactatacaaggcggatcccagacgttcgacgggctgaccatcgatgccactgcaaacggtgccaagtttgcgccgcgcgccaatgacacccagatcaacgccggaaccatcatcagcatcccggtgccagcccacaccaatacagccaccatcacccttgcgttgtccggcggcaccaccactattaccgcggatgccggtgaagtgagcagcgacaacacagttatcgccttgcctgctgcggagtcggctcgtacggtaaacgtcaccttcactgcccagacctatctcaacggcatcgcccttgccgaacagcagccggaacccgagttccccggtacgcccacggtcgcggccaaagacacgaactgggacttcacggaaaccggcatcgatcgaccggccgtgcagggcctaccgacaactaccaaggcgtcgccatcgacgctcgggcgcaaggcgccaagttcaacccgcgtactaccgcggcaagcggcggcagcgatactcaggtgaacgctggaaccatcctgtacattccggtcgcacaggccgagggcggcgctacagtcaccgtgaagggccagctgtacggtcctacgctcaagctcgacggtacggacatcaccaccggcactgctgtaaccatcgcaaccgacagcacgcgctacgtgccgctctccgttgaaggcacgggcagcctgtacctgaccggcatcgccatcgactacgcggccggctcccccgccgccaccagccacacggtcaccgtgggcccgaacggccagtaccggaccattcaagccgctctggatgctaacgactcttccgaaaccgaccgactagtgctgaagatcactccgggcgactatcgcgagaagatcaccgtgaccaagccgggcgtcaccttcgccaacgccgacgtgaccgccaagcgcgcggtgacgattcgcgccagctactattcgtccaacacattcgatgccgacggcaagtttgtgccgcaggatgaattcgaccttggcaccaacaagtgcgccaccgtgaccattggcgcgggtgccacaggtttctccgcctacggcatcaccttccagaacgattacaacgtggtggatcacacggcggcgggcgagcagacgccggccgtggcgctgaacacccaggcagacaaggtgtacctgaagaacagccgcatcatcggccgtcaggacactctgtacgtgcagggcgccggcaaccgcgtgtacgtggacggcggctacatcgaaggcacggttgatttcgtgttcggcgacgccaacgcctacttcgccggcaccgagctgcacatggccgcgttcgccggcaagaacaacggctacttcaccgccgccaacaccaagaagtccggcgtgggcctggtgtttgaccgctgcaacttgaccgttgccgcagcatatgacgacgatgccaagctttcgctgggccgcccgtggcagacgttcgcgcagtacacgcaggtgcgtaagggcgacggcagcagctatgtgaccggcgtggatttgggtacgaagaactcggcgtatacggacacttcctcggccgtgacctacctcgacagcacgatgtccagcaagatcaccaagaatcgttggaatgtgtggaccagcaagaaccagagcggcaaaagcgtggacgtgaccttccacgatgatgtgcgattcgcggaatacgccagccacgatgaaaccggcgcgctgcttgatccggctgattataagaacgtcgtgctcggctcgatgtctgctttggatgaggctcaggtgcaggcgaagcgtgctgaattgctcgcggcactgggcttcggctcggcggctggtcagtgggttgtgccggatggcgcgtggccattcgcttacgacccgaactactcgaccggcactgatgtgcagccgactcagccgggcggcaacgcctcgcctaacgcggattcggcggccaaggccgacaccatgccggaaaccggctcggccatcattgcggtggttgtagtcgccgtgccgctgctcgttgctggcttggcgctggtagcagtgcgccgcaatcgccagcagtgattgaaagcgttgctgcgaaccggacctggtgaccttgtagacgggggggctatctccgttgaaagaggtacattgatggctttgcagaaagccaactgctttcaaaggggtacctgaaccacgaaacctcgagtataagcgttgcaatgacggcgtttatactcggggtttcccatattcagtacccctctgaatgcagttagcttggatcgatgatcatatccaagaattcactcgtatagtggtgcgtaatgcttacgtatttgggatagcacttgttgctcgttgtacatatagcaatgcccttgcctcctcacggggaagcaagggcattacgctactgcttagtactgcttagtattgctcagcactgctcagcgattgctcagcggcaagcgtcacagcacgccctgggcaaccatggcgttggcgaccttgacgaagcctgcggcgttggcaccgagcatcaggtcaccctcgtgaccgtattccttggcggcggccagggagttggcgacgatttcttccatgatggacttgagcttggcgtcgacctcttcgaaggtccaagacaggcggtagctgttctggctcatctccaggccggagacggccacgccaccggcgttggcagccttggccgggccgtacagcacgccgttcttctggtagacctcgatggcctccggggtggacggcatgttcgcaccctcgacgaccacggtcacgccgttgtccacgagcttctgtgcggattcgccatcaacctcgttctgggtggcgcacggcagagcgatgtcgcccttgacggtccacacgcccttgctgccctcgtggtactcggagcccggaacgcgctcggcgtattccttgatgcggccgcgctcgacttccttgatctgcttgacgacctcgacgttgatgccgttcgggtcgtagatgtagccgttggagtcggagacggtgacgaccttggcgcccaactgctcagccttctgagcggcgtaggtggccacgttgccggagccggagatcacgacggtcttgccctcgaaggagtcgttgcgcagcacgcgcagggcttcctgggtgtagtagcacacgccgtaaccggtggcctcggtgcgggccagggaaccgccgaattccagacccttaccggtcaggacgccggagtactcgtcgcggatgcgcttgtactggccgaacaggtagccgatctcacgaccaccgacgttgatgtcgccggcgggaacgtcggtgaactggccgatgtggcggctcagctcagtcatgaaggcctggcagaagcgcatgacctcagcgtcggacttgcccttcgggttgaagtcggaaccgcccttgccgccgcccatcggcagcgtggtcagggagttcttgagaatctgctcgaagccaaggaacttgacgacggactcggtcacggtcgggtggaagcgtagtccgcccttgtacgggccaatggcggagttgaactggatacggtagccgcggttcacctgaaccttgccctcgtcgtcaacccaggccacgcggaacttgatggtgcgctccggctcgacgatgcgctccagtacaccggccttctcgtactccgggtgcttctcgacaaccggctgcagggtctcgaagacctcgcgaacggcttgcaggaactccggctgatcgccgtcacgggcaacgacctggtcgtagacacgcttgatgtactcgtcagtgagcatgattctcctcgatttgctagggaattaagacggttttattctatgcgcgcaggcccttgctgcatagagtctcgctcggataacgggaaagctatcggcgtggttatggggtggttcaagtttccgtttgttagatttttcggcgattgctggatgtctgtctgtgcgtgaatcgggtcgaaatggaagctgcatcacaccgaaggtgcgttcatatagtggacataaaggtggacttgggtgatgtcggatgtgcccgttgggaatcgtgcgccgtaggggccgaggtcttcggcgcgcaggttaccgggttcgcggtcagtgcgcgaagtaggtctgcagaatcatcgtggtctcggtgcttaccggcaccgtgcggtggatgagattgagcaattcctcaagggcggtgggggaggccacgcgtaccaccagtacgaagctgggggcgccggccaccgaatagcaggagacgatgccgtcgatattgttcagcttgtccggaatcgaggattcggctgagtagtcgagcggggtcacgttgacgaacgcgctgatgggcaagccgcgctgctcttggtcgatgatggccttgtatcccttgatgatgccgcgcttctccagcttctgcacgcgcgactgggcggcggagacggacagtccggtcgcctgggccagttgcgcgagcgtggcgcggccgtcggcctccagcatggtgaggatgcgctggtcggtctcgtcaatcgcggtcatggtgtcttctccgttcgttgtgctctgtgttcactgtacctgttgccggaatgcgatggctttccgattttgcctggtaatttcagtagttcttcctgtgttttctgttgtgtggtggaatgtttatgcctaaagtcctaattgaatgtaataattccttctgaaataagagaacgacgaaataattccattgaggagggatgatatgcagaagttttccaacatgcctctgtccgaagttgcatctgctgctgtgcctgctgccagacgggttgctgtgccgaccgccaagcccgcgagcttgtccgccgaagccctgaatatcccgcgctccggcatccgagacgtattcgaccgtgtagagcgcgtgcctgacgcgatttcactgaccgtgggggagcccagcgccacggccgcgccgcatatcgtggcggccgcttgcgaggccgcacaggctggccgcactcggtacaccaacgtgctcggcgtccccgaataccgcaaggccgtggccgattactccgcccgtgtgaagggactcacttatgatcccgaaaccgagattcaagccgttgacggtgccacgattggcctgtttctggcgctgaaagccgtggtaggcaccggcgatgaagtgattattccctcgccgttcttcacttcctatgacgccgaagtgatgctgtgcggcggccgcccggtcaccgtggcgctgcgtccggagcacggcatgcgcgtgaacgcggcggacatcgaagcggcgatcaccccgcgcacccgcgccgtaatcatcaactcaccgggcaatccgaccggcgcggtaacctctgccgccgaactggcgcgtattgccgaagtatgcaagcagcacaatatttgggtcatctccgacgaggtttaccatccgttcgtgtttggggaaacgttcggggaaacgcttgggggagaggcagccgtggcaccatcgatcgccgcggtgccgggcatgaaagagcgcaccattgtggtggaaagcctgtcgaaaacctatgcgatgaccggctggcgcatcggctacctgctggcacccgaagcggtcatcgaacagaccggcaaaatcgccgaactcatgcactcctcggtgaactccttggcgcaatacgcaggcgtggcagcactggccggtccgcaggatcatgtggccgccatgcgcgaggaataccgcgccaagcgccagatcgtgctggacggtctggccggatgcccggtattgcgcttgattgaaccgcaaggtgcgttctacgcctttgtggacgtacgcctgactggccttgactccggtgaattcgcagaccgtctgctggacgaagagcgcgtggccgtggtccccggcgaggccttcggcgaggaggggcgcggcttcgtgcgcctctcctacgccggagatgccggcgagctgcgtgagggcgtcgcccgtctgcgcgcattcgccgaacgggtatggaaccccatcaccggccaccacaccgccacctatcaccccatggaggtgctggcctgaggcttaaagcgaggctaggccgccaattcagactcgtcggcgcgagcgatggcctgcttcttggctcgcagcaagatgtagccgagtaccagaacgttggccagagctcgatgttggcatcgcgtcaaaacaaccgcattaaggctgccgcgtttcgtatcgttacgcgtaggggctggctgaggcgtaatgctgaagagtaacattgaagcaatggcaatcaagccgatttgaggaagagaagcacacgatggcgtactgcggccactgcggaaatagagttgataggccggcacgattttgcccggcatgtggagcgtctgtagacagcgcaccggttgcgtctgtaccagtgccggccgcatcgtcagccgtaccgactgcgtcgataccggcacctgctgtgccagcgccttcagtaccaccatcgataccagccgcgccggttgccccatcggtttacgccgcgcccgctgccccacagccggcaccaactgctcccttgccagctttgccgattcccgctcctgccgcatatcaggcgactgatgcaaccgccgtcctggcaccgccgcgcaaatccagcaagaagctgatcgccgttctctgcgcattgcttgcgacgattctggtggcggccttggcattcatcgtccccaacttcaccgccgtcaaagcgatgctgggcttccagcccaccaatccgctggtcgtcaccttcgacgcgatcaactcgctgtccactctgcgcagcaccaaatacgaactcagaacccacagcagcactgacgactcccttgacgcgcggatgtctggcatgtattcgctggggcaaaaccaccaatgactcctccgcgtctgtgaccatcaagacagatgaacaggcaacaaccctcgcttggcacaaaggcgcattcgccgggaaaaacgtttggtatgatgacgacccctactacatctactacccggccgaccaatatgaagatgacttaaggaacggcgttggtagtgatgtggcggacttgatattgaacgtcaaggatgcgttggtcaagaacggtgcttgggacatcaccggcgcggagcgaacgttctacgatcagctggacaagatgaacgacgatgggtactcgaacgacatcgaccgggccaagggcacgaaaacgtctgccgaggtgaaggccgaggccagcaaattcatccaacaatatctcggcgtggagctggaagataagaatgtgcgcagccagctgttcccgaatacatcgtctgccaagtctgccggcaacacgcagctctcgtatcaaatcgatgtcaaggcattggcccagcactttgtgaattactggatcagccatgaagcgcagtatccgcatctgaaatcatgggtgattcagcagatcgaggataccggtgtgggcgatgctgaaggcgagtaccgtcaggcgctcgacaatgtgcgcaactgggacttcggcacggatgaagagccggatatgccgactatcaccgtggatctgaactacggcaggaagcgtctgatgagctcgattgccgtaagcgtgtccggcaaggacgaatacggcgactcctacaaaggttcgctgtcgttgacgctcagccagcagaacgcggtgtctgtggacgaccccgatttgactgatacggtgagcaaagccaaggacaacaacgagctggatctgtcttgagcagaatcagaatgtgcggaacgccgtgaacagatcatcgacgtgacgtcgcatgtgattcacagaacgggttttggggcttttccgttcgtcaggtagccgaagcatgcggattgaccgagccggcggtcatataccatttcaagaacaaagtcggcttgctgattgccgtgctggagcatcgtgatcgggaagacatggctacgtttgcccattctcttggcgttgaacctgaggatatgtggagcggcaacgcgcagttcggcattcgtgatatctgtgctgcccttatggagcgcaatgcggctcagccagagatggtgcggttgtatataccgtgctacaaggcgaatcgttgaacgagcatcatcctgcctatgagtattaccaaaaacgagaacatcgcgtgatggacaccttaacccgagcagtcgagcgtgacggtttggcagatcctcgtcgcgaggcgcggactgctttgtcgatgatgaacggcattcgggtccgtttggctcagggatcgggcatcggtcgatttagtggccgattggaatgcctatgccgacttccggtggcctcgacagtcgtgaggcaataagacttttctcgtgagatacgctatcggcgtgtcgtcatctttttgttgcaatacgcagaaaatgcaagaacaaaaacccttggaatcggactgattccaagggttttgttgtgtctgtggagctagccgggttcgaaccggcgaccctctgcttgcaaagcagatgcgctaccagctgcgctatagccccgtgagaaaaaaagagcggctcgcggccgcttcatttttcctgtgggcccgggaggacttgaacctccgacctcatccttatcagggatgcgctctaaccagctgagctacgggcccgatccatacgcttcaaaagcgcacaagtgattacaataccattgaacggcggtatgtcaataacggcgtgtcgcgattgtcgcttgcgccatgattgccggcgcagcggagcatgacgagtgcgatgaggctgttcgcgtggtggaagccgtaggccatgcggatggtgaccttgatcctgttgtcggacgcctcgagcctggcgttggagtagcccagctcgatggtcctgaggatgtcgggccacgacggcggatcttccgggatggcttgccgctctcgtacaactgcacgatctgccgtttgaacgcctcgtcgtagtggcggggatgtttcgggtcggccatcgtcggcctccaatctcatgtcattcgtccctcatcggactgtctaatacgttgtagccaatccacggcgtcacatcgtcaggctgtccgggtcgaggaggaaatcgtagacgctcatcgtgaggatgccgtgctcgtcgcggacgggtttgaccacgtcgcgtacgaggacgatcttctggaagctgtcgtcgatctcgagcagcgaggcttctcctgcgcgaccttctccggtgtgggcagttggtacgcggattggtcagggcgccgatggaggaggccagcacgtcgaccaggtcgtcgagctcctgcgacctgcgcagcccgttgcgcatgcgcagcagcccgttgatcaccccgtacagacggggcggctcctcgccgcgcgtacgaacgcagttcatgaagaattacgagtgattcgtcgaagtcttcggcgttacggccgccgcctgagccagggcggcggccacttgttcgttgacggctccctgctgtgcgatggtgacgcggatgcctcgactggcatgcgcgtccacgcccgcaccggcccccgcgtcggctccggtggcgtcggcgctgatacgcaggctcggcaggaacggcttgccggcggccacacggatgccctgttcggccagcagtcgcagcgccgccggctcgtcgcgcaccggaatccacagattcagtccgtcaccggtatgcacgtccaaactttgacgcagcagcagcgcgtgcatcgtcttttgccgggtggcgtagatatgccgggcgttggtcaccgtgtggaacgcctctttgtcggccagcatttcatacagaatctcttgcaggaaccggctcacccatcccgatcccaagcgtcgttgggcgataatcgcctccacggcatcctccggcccagacagcgcagccaagcgcagatccggcccgtgcgacttcgaaaaactgcggatatgcaccacgtgttgcggcaatcgttgcgccaacgatgtcgcatacgcattggccacatcgccactgtgatcgtcttccacaatcagcggcataccaacgccattcgggtagtgcgcgagcagcacgtccgccaaagcgtcgatgcgttgcgggctgaagctggccccggtagggttctgggcgcgcggctgcagcaggatcatactgacctgatggccgccgtgcggcaccgccagacgctgcgattccagcatggtcagcgcacggtcgagtgcgtcgggcagcataccgaacccgtccatcggcacgccgaacgccatcgcgccatgtgcctcgatcatgtcgagaatcagcggatattccggtgcttcggtaatcacaaaatcacccggctgaacaaaagcgttcatggtgtgcgccaaaccgtcgcccgcgccggatgccatagtcatcgcctccggctcatacggccagttgcgtcgcaaaatctgttccagcatgggcaggatggtcggcccgtcgtatgaattgacgaatgccttgtgcgtgccgagcttgccgagaaacgggcggatgtccggcagcagcgaaaggtccggcgtgcccttggacaggtcgataatcggtcggtccggcgcggtggccggggcttcggccagcaagtcgccggcatcgtagcgatgcgtgcgcgactgccgcagtacgaatgttccggcgcgcccgcgggagcgcagtatgccggacttggcgagggcatggtaggcactggagacggtggccggactggtgcgtagcagtcgggcgagatcgcgtacggtgggcatgcgctggccttccgcaagtatgccggaggaggtcagcgaggtgaccgattcgacgatgcgttgcggggtggccgtcgcctcggtggtgaggatgagtgaggataactggccggcatcaacggccaggtcgtcggtggaacgcaggggagcggccgtaatgcttggctcatcgttgtagccgacggcatgtgcggttgttgatgcggttgatggcgatggcgtatccatgatctgcctcccggatcttggcggcgagcgtgatgagcgcgcgtctgcgtgaatgttgccgattgccgccggctgatgatcgatggcggttgccggcttgttgctggctgcttgactgccgatagtaacggtcactgtggcaacggtagtcaaatgttagcgccgcattgtgcaatgagtatgtttttgaataacataaacattacataatctggatacaattattgttcttgttcctatgtttcaaaatgatttcgtattcgctactactgtaacattattaaatgttcgagtttgacgcgaaatgttcaactctcataatgacattcacagcgcgttgctgccctgacccgatccacgggagacggcatcgggcacttcgagaaaatatcgaggaaaggacacatcatggggcatgatctttcgcaggatgcggaaatctgggacgacgcttacaagctgaaccgcgcacacgtattccattcgtggcacgcacagcgcaacctggatcccactgaagtggtaaccggtcacggcgtgtggctgaagtacggcgacggccgtgaaatgctcgacttcaccagccagcaggtcaacgtcaacatcggctaccagcacccgaaggtgatcgagggcatcaagaagcaagcggaactcctgtgcaccgtcggacctgactacgcgaacctagcccgtggccgcgccgcctccctggtggcccgccgcgctccggaaggcttcgacaaggtgttcttcaccaacgctggcgccgacgccaatgaaaacgcgatgcgcgccgcccgcctgttcactggccgcgacaagattctgtcttcctaccgctgctaccacggcaacaccggtgcggccatcagcgccaccggtgactggcgccgtaagcccaacgactactctcgcggccacgtgcacttcttcaccccgtacctgtatcgctccgagttctccgcaaccacccaggaagaggagtgcgagcgtgcgctggctcacctcgagcacgtgatccagttcgagggcccggacaccatcgccgccgtgctgctcgaatccgtgccgggcaccgcaggcatcatcattccgcccaaggactacttcaagggcgtgcgcgagatcaccaagaagtacagcatcctgatgatcaccgacgaggtcatggccggcttcggccgcaccggcttctggttcgcactcgacgactacgactacacgccggacatcatctccttcgccaagggctgcaactccggttacgtgcccgccggcggcgtgattatgagcgacccggtggcccaccgcttcgacgacatcgtcttccccggcggcctgacctactccggtcacccgctggccatgggcgccatcgtggccacccaggaagccatggaagaggagcacatcgtcgacaacgcctacaccatcggcaaggacgtgctcggcccgcagctcaccgctctgtacgacaagcacccgaagatcggcgaggttcgcggcaagggcgtgttctgggccgtggaaatggttgccgaccgcaccaccaaggagccgctggacgacgccacgatgaagcagatcgtggccgaaggcgacaagcgcggcctgattctcggcgtgcacaacaaccgcatccacgtcactcctccttgcgtcatctccgccgacgaggcgacccagggcgtcgagatcctcgaccaggtgctgaccgcggccggttgctgattgggtgactcaatggctcggtgacggtttgtagccgttgccgacagcaccgttcattgctgatggcggcccgttcggaacgttaggttccgggcgggccgccatcgttgtccgccgttgtgcgagaatgacttgcgtgccttatcgccgtcgtcaatccaccgctccgaagtccggtgcgccgaaatccgttcggtccgctgccgccgggcagtcgttggatattgatggcatccatctgcacctgacgcgcaaacccatcaaaaacctgtatctgcgcatcaaaccgccgagcggccgcgtcgaaatctccgcaccgatgcggatgagcgagagtcgcattgcggatttcgtcaaagagcgacattcgtggattctcgcccagcagcagcgcatggctgaggcgcaacggcgctccatcatggcattgaacgagggcgccggcttcgagaacggaggtcgtggtgtagctggtgccagcggccatgatggaggcgttgccggtcgtccgaaaaccggtgatatcagtcgtccgggaattggtgacgccgggccaggccaagccggtacgaatgtccaaccgtattttgaccgctcccaaatctggaccgacgaacgcaaacgacaagcggcggccgcgatcaacgccgcgttgccacagctgctggccaagtgggggccggtcgtcggccggcagcccacgcatatcacgctacgggtcatgacctcgcgctggggatcgtgtacaccgcgaaccggccgcatccgtctgaaccttcaattgggactgatggaaccgcaattcctggaatacgtcttggtccatgagatgacgcatttgtgggaaagcggccacggtgccggattccagcgccgcatgaccgcctacctacccggctggaagacgctgcgccgcgacctcaaccgccgcgtggtgctgtgacgatgacgggtcaggcttcagtgccggcgatgtggctgatggcctgatcggattcgttcgcatggtccgaatgcgccaccatctcgatggccgccggacacccgctcaccgacgaagaccgctggccttggctcgacaccatcgccgcgtggatcgacgagcgcgtggccgccggcgatcccgccgtggtcacctgctcggcgttgaagaagatctaccgcgacaagctgcgccgtcaaggcgtggtgttcgtctacatgcagggcacattcgacgaggtgatggaacgcctttcccaccgccaaggccacttcatgaagccgagcatgctgcaatcccagtccgacattctcgaagagccgggcgatgacgaaattcacgtcaacgtacacatcggccaggccgatcccgaacacgaggccatggccgtggccggtgccctcggcctgtgagccatctctcggctccccttagtctcacttcgccacacgtgcggcgcatcgacgaactcgaacggcgcatcagcgaacttcagctggagctgaagcagtgtgaaggccagcaagggcgaaccggatcggtccaaacgggctactcaggccgaccagcccagccagtccgttcagaccgacctaactgatcagagcgggccctctgaccagtccgaaccatctgaccgacatgtacttgttgactaagtgtgcggcccgtcattcgttatggaacatgccggccatgtatacaggcaggtaggttacattcccttcgactgagacgttgcacgggccaagcacatagcctgtattgagatggtattcagggtgggcgagcacgttgtccattgcgcgatggcgtttgtaggatttgccggacttcacctcaatcggcagcacgtgatcgttgcggtcttggatgaggaaatcgagctcgccaagcttcttactgttgtagtagtacaggtcaaatccgtgagcgcgtagctcttgggccaccgcattttcatagattgaaccgtagttgatatcagggttgccgtcgagtacgtcgagcgcggttttcttgagaaacgagccggtaagcagacccacgtcgttgtaaaagagtttgaagaggttacgttccttgctcatctccaacggtgtgcacggttcgtccacgttgtacgcggcgacggctacatccgcattgaccagccaatcgaaatcggaagcaaccgattggaatctcatgttcttttcgattttggcgaaggtaaagcgcttgtttgggttatttaactcgctgggcaccaaatcgtagatagcgcggatatgcagccggtcttctttgcgcgcgtattggctgatatcgcggcgatattcacgctttatgttctcttgtatagtgcgcacgtccgcaacgctgccgtttgccacgaacgagtcgactgcggcaggcatgccgccgatgaccagatatttggagtatagctccatgagcctttgatgaatgaactcatccacttcctggtgcttggcaaagcattcggcaagcatatcgaatacgtcgttgccgatatgctgcgaccagcagaactcttggaaatccagtggatacatatccagctcggtcaggtacccgaccggtaccgagcgtatatcttcgagctcgactccaagtagcgagccggaaagcgcgtaatcgaaccgaccatcatctacaaggaacttaattgcggtgaccatttccttgcaacgctggacctcgtcaaagaaaatcagggttttgccgggtactaatggcgtatttacggccagttccagcctcatcagtaggtttttggcatcgcggggccgatcgaataatgcaacgaggtcagggttctcgatgaaattgagctcggcgatatggtcgtaatgctgttgggcaaagtgcctgatgatataggttttgccaatctgacgggctccggtgaccagcagtgcagtgcgtttcggcgcggatctccaagcttccagctgtgtctcgatttttcttcgcagcatgagaatctccagtcatttgtaggccttgcatctatgctgggcacgttttccaactgtttatagcgcatattttacacttttccaaccataagaatgcggttttggctacgttttccaacctcaaaatggggagttttatacacttttccaacttatgtatgtggagactctctatttcacgtgagacgaaagtggctcccctctttgaggggagccacggaatactgcttttacttatgccaggtgagagcgcatgaaccactggaacttttcgagttcctgcacgtggtcctggatgatgttggagctgatcacatccagctcgtccagctcggcgatggccttgcggtcgtcggcgatgaaggcgtcatagtactcgatcagcgccttgagatactcctcggtgcccacgcggccctcggcgtcgaacgacttccacgtgcggttgcgcacgatggcgtccgcgcggccgtccggggtgccgcccagagtggcgatgcgctcggcggtctcgtcggcctgagccagcacggcctcgacctcggggtcaagcatctcgtgaacggcgatgaagttcgggccggtcacgttccagtgtgcgtgcttcaggaccagagcggcctcctgctcctggctcagtcggttctgtaggatggcgatggccttctcactggccgcttcatcaaggcccggcacaacaaacgcaagtgtcataatgttccttctttcagtaggtggaacctgtccatataattctacgatttttggttatgccccgggccgaacgaataggtggtgaatatcacgtggctagttggcatcgtcgctttgtgattcggctggcagtggcgcatggtccggggcaccggctttgcggacttcgatggtttcgatgcggcggccatccaccttggtgatgaccatgttgtagccgtcgtcggaatgcagcacgtcgcccaccgcacccatcttgccggtcttggacaggaagtagccggcgaccgtctcgtacgggccgtcctccaattcgatgccggtcagatcggcgaagtcctcaatggtcatgctggcctcgatcgtggccacaccattgacgaacgcggtgcgggtggtgcgttcgccgcccttctcgctgggcagatcgtactcatcgcgaatatcgcccacaagctcctcggtcatatcctcaagcgtcacgatgccgtccgtgcctccgtactcgtcgatgaccacggccagatggatgccgcgcttacgcagcagttccaggctcggcagcagcttggaggtgccgggcagggagatgccttcgcgcaccacatcgcgcacgatcttggcgttcggatcgcgcacgtccagcagatcgcgcacatgcacgaagccgatcacgtcgtcgaaatccttgccggtcaccgggtaacgggagtacggctggtcgcgtacgaacgcggcggcctcggccaagggctggtcgccctcgatgaagaccacgtcggcacgcgggcgcatcacctcggcgacgatggtttcggacgcatcgaacacatcgtcgagaatcgtgcgttcgtccttggaaaggttggtgttggagctgaccagcacgcgcagctcgtcgtcggacacctcggactcggtctgctgcgggtcgaagccgagcaggcggacgatgccgttcgtgttcttgccgatgagccagatgatcgggcggcagattgtggcgaacgcgtcgatggcgggtaccacggcgcgcgcgatctgctcggtgcgctgcatggcgatgcgcttgggcaccatctcggagatcacgatggagcagtaggagatgatgagggtcaggatgatgttcaccaggccgccggcgatgccggggtgcacgccccagctttcgaccaccggaatcaggtagggggcgatggaggaggcaccgaacgaggcggacaggaagccggagagcgtcacgccgatttgcacggtggagaggaaggtgttcgggtcacgtgcgattttggcgactttggcgccgcgagcgtcctcctgctccatttgctcgatctgcgagccgcgcagagagaccaatgccaactcggtgccggagaacacggaaccgataacgagaaatacaaaaatcaggaggatgttcaaaccaagtgacatggcttcaactctaggggagcggcacgtcaaattggggtgtgctggctgggcagtaagaaactcggcaaagggaagggcactcttatcattactgcggccgacgtgtcgaccggtgtttccgatgcgttgctcgccttcgacgatgccgtatgcgctccagcgctggacggcattactagtgcagagaggctgtttctcgcggctatggccaaggattcgccaaatcccacgcaggttggcgatgttgcggatcgcacgctcagaagctcagcacttctactttgccggaatcgagctgatagcgggcgccgacgatcatgagcttgtcagcggcgagggcctgctggatgacaggagactgctccaccaaagtttcaataatgtgggccacatgcacgcgctcgatgtcttcatgcgcgtcgagctcggcttcgcgcgcctgccagacggacatgccggcctggcgcagaataatcgattcggcggcggcgatgtgctcgtcgaggtcgtccatcgcatccgcggcctccagtgagccgtcggcttcggaagtgatggtgtgcatcaggtcgtccagctcctgctcggcggcctcgattgcgccgcagtgctcgtgaccgagcacacagatcaggctgacgtgcagtttcttgaccgcgtactccagcgaggcgataaccgcgctatcgatgagttgcccggcggtgcgcacggtgaacaggtcgcccaggccctgatcaaaaatgatttccggaggtacgcgcgagtccgagcaggagagcaccgcggcatccgggttctggccatcaagcagcgtctggcgggtctccttgtcctgccatgggtggtcgggcttgccctcggcaaagcgccggttgccttgcagcatgcggctccacgttgcgttcgcggtcgattcctgttcaaagtctgactgagccatgaaacctccattatcagcggactgctgattgccatattagcgagtattcgcgcatagtcgtgattggggcaacggccatttgggcacaagggttgcgggtggtgtgataaggctcatacgttacacccgcgcgagccgtggctcaccacattacgataggtggtggtaaacgcttgaagattaacaattcccgaaaggaccgatgatgactcttctgcagcatgaactgaccgatttcaaggtgaacgcattccagaacaacgagttccacgaagtgaccaaggacgatgtgctcggccactggtccctgttcttcttctacccggccgacttcaccttcgtgtgccccaccgaacttgaagacctggccaagaactacgccaagttcaaggaaatcggttgcgagatctactccgtctcctgcgacacccacttcgtgcacaaggcctggcacgacgccaacgagaagatcgccaagatcgagtacccgatgcttgccgacccgaccgccctgctggccaaggacctcgacacctacaacgaggccgatggcatggccgagcgtggcgacttcatcgtgagccccgagggcaaggtcgtggcctacgaggtcatctcctccaacgtgggccgcaacgccgaggagctgctgcgccgcgtgcaggcctcccagttcgtctacgagcacggcgaccaggtctgccccgccaactggacccctggcgaggaaaccatcgagcccagcctcgacctcgtcggccagctgtgatcgacactgaataggcggtaaccttggctcccctctctgaggggagctgtcgctgaaagcgactggggggagtgctcgcgagagctagcctgatccgatatgctcccctcagtctcactacgacagctcccctcagagaggggagccagtgtatgtaagggagttttcatgactcagaccaacaatctctatgacgtcgtcgtcattggtggcgggcctgctggcctgacggccggcctgtacctggcccgcgctcgctaccgcgtgctgattctcgaaaaggacgatttcggcggccagatcaccatcaccaacgaagtcgtcaactatccgggcgtgggccgcaccacgggccgcgcactcacccagaccatgcgccagcaggctcaggacttcggtgccgaattcctctccgccgaagccaccggtctcgacgtggatggtgacatcaaaaccgtgcacacctcacgcggcgacctcaagaccttcggcatcctcatcgccaccggcgccagcccgcgcaagctgggtttcgagggcgaggccgagtacgccggccgcggcgtggcctactgcgccacctgcgacggcgagttcttcaccggcaaggaagtactggtggtcggcggcggattcgccgcagccgaggaatccgtgttcctgaccaaatacgcctccaaagtcaccgtgctcgtgcgcgaaccggacttcacctgcgatgccgcagtggccgccgaagccaagaacaacccgaagatcgacgtgcgttatcaggtcgagctgaagggcgtcaccgccggccaaggaggcctgcgagaagcctcaatcctgaaccttgccaccggccagaccgaaacgtggaagcccgccgacgccggcaccttcggcgtcttcgtgttcgccggctatgtgcccgccaccgatttggtgcgcggcgtggtggagctcgacgaccacggttacgtggtcacgcacgactacctcagaacttcggtgccgggcgtgtacgcggccggcgatctgcgcgtcaagaacctgcgccaggtggtcaccgccaccgccgacggtgcgattgccgccgtggaactggagcgttacgccaagcagatgagcgagaaaaccggcttggtgccgccgcgtcccactgcttccgcttatgaggagtccgaggccaaggccgcctccgccgcctcggctgctggcacgacgcccgccccggctcccgccaaacgcagcgccgatgccgcagccgcagccagcgccgccaagaagcccggcgaactgttctccgccgccgtcaagcagcagcttggcgtggtcttcggacgcatgacccgcccggtcacgctcgctctcgaactggacggcactccgctttcggcggaattgcagggtttcatcggcgagatggttgcgctgtccggcggcaagctgaactcggttgccgttgatgccgcagggctgatcacggcggtggatggtgcttctgtgcctacttctttggtggtcggcgaaccgctgtccgtcaccttgccggacggcaccgaactgcccacttatggttcgttggacgattccggccgcgccacattcgacgtcgccggcgtcctgccgctcgcccgtccgaccgtgcgcatctgcgtgccggctgagggcgacggcaaggccggcaaggacggcaatggttcactggtcttcaccggtctggccttccacggcgtaccttccggccacgagttcaactcgttcgtgctcggcctgtacaacgcggccggtcccggccagccgctgggcgatgacctggtcgaacgcgcgaagtccatcacggacccgctgaacatcatgatcctcgtctcgctcacctgcacgatgtgcccggaaaccgtgcttgcttcccagcgcattgcctccctgagcccggccgtgcgcgccgaagcctacgacgtctcgcacttccccgaacttaaggaccagtacggcgcgatgagcgtgccctgcatcgtcatcacccacgccgacggcacccagcaagtcgaattcggcaaaaagagcatcccccaaatgctcgaactggtcggcgcgtaagccgcacgacctcaggtactcaacagcaacaacaacgattctgccaaaatcgtgacgtacatcgattgatgcgatcgatgcgcccgactccggcagaatcgttgttttgcggcagctcagcctcggtcttcgacggccttcgtgacgtttctgtcgccgaggtacttgaccaagctgatgctgatcagggccacgacgaacaggccggtgagcaccggaatcagcgcggcgtagcggtgggcctgatcaggcgcgtgggcaactacgaacgaggccaactggttgccggacagaccggcgaacgcccaggcgctcagcgtcagaccgtgcgtggtggagacggttttggtgccgaagtgctgatcaagcagcacgggcagcgtcgagaaaccgccaccatagcccgcgttgacgaggaacagcatggccagcacggcccacagcagagcgttgccgatgctgttggtgaagatctgcagcaagcacacggcaatcgacatgatgaagattacctgatagacggtctcgcggcgcttcaggtggtcggagagtgtggagaagcccacgcggccagccgtgttgaacacggagtccacggcgagcaccagtccgatgatgccggagatggcggcggcaaacttggcggggctcaggttggcatactgcgggaaggccctgagcacatcgtgcaggatgtccttctcttggctgatgagggccaggccgcaggtgatgttgatatagaaggctatccagatgccccagaacacgggcttcttgaggattgtcttgcggctgacgtgtgaggtcgcgggatcgtacacccagccggccggacgcttgatgagcaggaagccgacgaacatcatcaccgcgtagaccgcggcgaggatgaagaacatgctgaccaggccaaccgtgccgatgagatattccatcagtgggctggcaatggccttggccaggccgaagccggcgacggcgatgccggtggcgaggcccttgttgtcggcgaaccaaagcatcaggttcttgaccggagtcagataaccgacgcccaggccgatgcccatgatcgcgccataacagatgaacacgcccggcaggaagttcagggcgatgctcacgcccgtgccggcgaagccgaccacgaagcagaccatggagacgagtgcggatttcttgatgtttttctccaccattggcccggcaaacgcggcggacatgccgaggaagaagatggcgagtgagaagccccattccacggaggcggggctggcgtggagacggtcagcgataagctgcttgaacacactccagcaatagacggtaccgattgggatatgaatcagcagcgcagggataatcgcgctggtccaacgattctcggtaaaccttgccatatatgggcggatcctttcgtaactggtgtacgatggcctgccggcccgaacgagagtcgtatcgcccatatccacgcacatcacgacggcatgcccccgtgaaccatccgggctgcacgaatcgaatcaaatcgaatcgtgcgaactgcgaacaattcgctaaacatccttggtgtgcatttcatcggcgctgctggctcttgtcgacgccgacaaacagaactataacgctgttatggggttgctgtggctgatttctgtggtcggaagctatgagctttctcacatcgaaaacagttatatgacggtatcggcgtgattgatacgtgacgtctgcccgtggacgcggcatatccctctcggaaaacaatgactccgtcatgtccatttcttggtttgacatgttttcgtttgcagcgtcggtgctcaccacggtgaccgcggcgttcgagtcgccgggcagggcctcgaccgagggtctcccgatgtctatttagaagtgcaacacccttgttggtcctgtaattctaacagttcgtcggcgaacgcctcggcgggcgtgcggtagccgagcacgcgcatggggcggttgttgatctcgtcgacgatctccctgacctcctttgccatgtccatccggatctcgcagcgtttgggcagataccggcggatcatgccgttgcggttctcgttgcttccccgctgccagctggagtacgggtcggcgaagtacgtggccatgcccagcccgtcgcgcagcctttcgtggtgggcgaactcggtgccgttgtcgtgcgtgacgctgacgcgcgcgccggccggcagcggcgagaacatgtccagctgcgccccgacgctctcgccggcggtcttgtccggaacgatgcgggccatgaggaacctggtccttctctccacctcggtgtgcaggttgcatcccactccgatgacgctgtcggcctcccaatggccgaacgcgctcctgccgtcggcctccggcgggcgttcggagatgggcactcggccggggatcgggaagcgcgacgtcctcctgccgccgtgcctgcggcgccgcctgtgccctcgcggcaggcaccgcgcccagcgttcccgaagcggcctgctggagtagacccatcggtagatggtctccgggcacacgcgcatgagcgcatcgtccggccacaggacgcgcagcctgccgctgatgagcagcggcgaccagccgcggcccagccattcggccacctgcgcccacaggcggtcgtgcgacagccggtagggctttcgtggcttggatctcctgcggtcggccttgcgctgcgcgggcccggcgatgtagtagcggccggtccatggccccgccttcagtcttttcggccggtacgggcggtacgactcgttctcgttggacgggaaccatgtgttgcgcttgatctcccggctgatgctggacgggctgcggcccagcatcgcgccgatcccgcgtatgctggcgccgttgcctacctcgatctggatgacctggcgttcctcttccgacaggtgcgaatatacttctcccataggtgcgacatcccttcggactggttttctaggcaatttccaatctaacgggtgttgcactttcatttagacaacgggtctcatcctcggctgagatgtgggcggtactatggattcttatcgataaggttcgtgatatgcggagatggtaacgatggtgaccttaaaggatgtcggcgaactggccggagtgaccgccaccaccgcctccgcggccctgcgaggcaaggattacgtcaagcccgaaaccatgcaacgcgtgtgtgacgccgcccgcaaactcggctacaaaatcaacctgtctggccggtccctgcgttctgggcggtccgataccatcaccttccttacctcgggcctcgagggcgactatttctcccatctggccatgtgtgtggctgaggaagtgcacaagcgcgactcgcacatgctcatcgaactgtcccggtatcttaccgacgacaacgatctgtcgtacacgttttcggacggcatcatcgccatcaatgcgccacgtgcggtcgatatcctgaagcggcacccggccgtcatgctggaaaactacgacaccagcctgcccgtcgacaccgtgaacgcgccgagcgacgccggctcacgggcggcaatcgaacaccttatcgcgcgtggctgtgcgcgcatcggcatcgtcggcgacaatcacgatcccaacaatcccaacatcattcccggctcgcgtgatattcgtatgcgggccgccaaggagacgattctcgcggccggactgccgtttgacgagcgccgtgatttcatcaaatcctcgtggtcgattgacggcggtatcgaggccgggcgcggcttggccaagaaaggcaagtgcaagtacgacggtctgtactgcctgaacgacggtattgcgctcggtattctgcgtggtctggcggacgatggcgtaagtgtgccgggcgatgtgcgcgttatcggcttcgacggcctgagccagggtgcgtacagcgtgccaatgctgaccaccgtggccacggatttcaagggcatggcggataccgcgctgaccttgcttatgcggcgtatcgagaacccggacgatgaattcttcccgcagaccgtgaacgtgggctataagctcatcgagcgtgagtctactgcggcgtgaaatggcgtgaaacagggaagtcccactctggcgagtgggactttaccgatatgcgcgggtaaaaggaaacccccgctgagtcgcgggggttgctgtgctgcgatatgttttgcgcgcgcaaagctattgcgcaaaacatatcgctacgttttggccttgggaagcccaccgggcttcccaagcggtgttgggccgcacgcgcggcccaacaccggccaaaacgtcagcctgtgttctgcaggccagcggcgacacctgaaacggtgcagaggatcagatagatgaaccctgcctgctggctttgcgagagctcttccttgtccaccttcttgcgcagcgacttgagcgccagcacctgggtgacggacagcgcgtccacgtatggggagcggatgcggatggcctggccgagcacgtggcggtgttgcagcggccacttgtcgcccacgatggccagaacccacttgcgggtgagctccatctcgttgagcaccttctcattgaggtcctcgcggtcgccgagggcaaggtacatcctggcgatgcgctcatccgtcttggcgatggacatctcgatgttgtcgatgaacgtggagaacagcggccattcctcgtaagcctgacgcatggtctccagatcgccgaacttctcgcatgcggtgccgagaccgtaccaggcggccaggttgatgcgggcctgagcccaggagaagatccacggaatcgtgcgcaggtcgtcgagcgacttggcgccgaggccacgcttggccgggcgggagccgatcggcagcaggccgatttcggtcagcggcgtaacgatcgagaaccacggggcaaagccgtcggtgttcaacaggtcgaggaagcggttgtgcgcggcctcgtcgagctgagcagccatgtcggcatacttctcggtcatctcggtgttgcgcttctccacgctcggcgcggactgcagcaaggtcgccgcagccacggattcgacgtggcggatggccagcaccgggttgccgtaacgggcgaagatgacctcgccctgctcggtgagcttgaagcggcacttgacggaaccgaccggctgggcgagcaccgcacggttggcggggccgccgccacgacctacggcaccgccgcggccatggaacagggtcaggtcgatgtcgtgcgactcagcccacttggcgatgcgctcctgagcggagtgcagggccagcgtggcggaggtcgggccggcgtccttcgaggagtcggagtaaccgagcatgacctcgagcttgttgccggtggccttcagacgagcctgaacctcggggatcttgatcatttcctcgagcacgtccaccgagttctgcagatcctcaagctgctcgaacagcgggatcacgtcgatggtgggcacgtcctccgggtgggagaaggccaagcggttgagctcgtagacatccttgatgttctgggcgctcttggtgaaggagatgatgtagcggcgggcggccttgaggccgttgcgcttctggatggcgccgagggcgcggaaggtgtcgagcacctcgtgcgtcatcggctgcagttcgccgcgctcgccatgcaggccgtgctcgcggatatccgcaagggcgcgggcgtgcaccacggagtgctgacggaactccatctccaccatgtggaagccgaaggtctcggtctgccagatcagatcctgcagcgggccgtaagcggaacgcttggcgccggcggcggccagcgaacgctggaccaccttgaggtcggcgaggaagttgtcgcaggagtggtacatgaggtcggcatcgcgttcgatggtgtagtgcagacggtcggccatcaccagcatgaccgcgcggtgcatctccttggtggagatcagggcggccttgtcggtcagacgctcgctcatttccttctggtggctccagaggttcttgagctcggcgctcggcggcgtggtctcggcttccatcgtgaggttgcggccgacggtgcgggtggcttgctcaagggcggcgatcacgtgatcggagaacttgcgggccacggcgcggctcaccttggcggtgacgttcgggttaccgtcgcggtcggagccgatccagctgcccgggtggaagaacgcggggcaagcgggctcgacgagaccggccttatcgcccaggacccagtcgtcgaagcgacggtaaaccttggggatggtgttgaacagcgtgttgtcgaagatgtcgagaattgtgtccgcttcctcaaccggggtcggcttcttcagcgcgattggagaagtgcggaacagggcgtcgatctcgttgtagagacggcgcaggcattccttcttatccgagccgccgaggcgcttgtactcctcaagcaattcggaaacgcggcgaatcttgccttccacggccttacgacgggcctcagtggggtgcgccgtgaagacggggtggaattcgagctggttgagcagttccttggccttggccgggccagtctcattgatgagctggtggtaggcgacggtgagctcgttgatcgggtcgaccgcctggtcaacgggcacgttgttctcgcgctcgtggagcacggaaacgcggtagttctcctcggacaggtttgccagatggaaatacgtggcgaacgcgcgggccagcagctgggcgtcgtgcaacgtcatgttgtcgatgacgttcacggcctccttcaggccatcctggtcggggttcggatccttcagctcggcgaaatgctcggcgctggcctccaccgcgtaatgacgcacggtgtcgaacgtagacagcagttcggggttgtattcgcccagtacgttacgcaggatctcaagacacagatccatgtcgtacttcaggctttcgggaagatcatgctcctccgggccctttcggccggtcccggtagtgacgatggcggcgtcagcgggagtgatctgttcttcaggtgttgccatataacctcctttgccgaataacaggttgctcggtctactggtcgtctgcggctcctccgcagttgttgagaccagtcgttgcgagcccacagcccatattcaacgtggttgttgtgtgggcaatagtgtatccccgcgaaatcgctatttacgttacgaagtccatatagtgcgccaagttgtccacctatagagaccgaatatcggacagcatatgagacactgtccgattcgcggaagatttgagcgccttacgattgctggcggggaaggcagggagtagtaatgaaggatgtgagcgaacagaagaaaaaaagtgcgcccgaagcgaaaggcgcaacggctgtacgtaaattccacacccactccattccgctggacatggaagatattgcacgcgattgggaaaaaccggtggtggacgccggtatcgccgccaaagccagcgtgattgtacgagtcggcatgttggacctgggagccggcaccggctccttccgcgtgcgtgaaatgatgcaccgcatcgcctacccgctgggcgtgcacgtacgcgccgacgtgaacctgacggatatcgaggccacctgtacggatggtcgtaaccgcatcaccgaagtcgtggatttgccgagtaccggcgtgaacaccgaacgtatctggctgctggaacatttcgccgactggttctccgtgaatctcggcaaggggtcgatgtatcacgtcgattcgcaactgtccgatggcgtggtcaagcatttggacgaacgtgacgcttcgcagtattcggccgatctggccaagcgcctgcgcgaacgtgccaaggtcgaggctgaggcggccaacggcagcgtggacgaggcgctggatcttgcgtcgaaaaccaaggtactcgtgacctccgtggccaagtccttggacgatgacaatgaagaagcccaccgacttttggcggacagcgcggaagtcactccggtcgaagacaaagcggccgaagagaaggcctacgacgatgccgaagtgtttaccggtgactccaatgagtcggttgaatcggcgaacgcggcgaacggcgcaaccgccgaaagccctgctgcaagcagtacgaagcgtaagaatcgcgtgcccaaggaatacgccgaacacttcaacgagcgctccgacgaagagaaggccaagggcggtatcaccgtgcggcaggcgcacgagcgactcgatctgattgagcgccgtaagccgctgtacaagccgtggttctccggtctggcctccgccctagcctgcgcggccttcgtgttcctgctcggcggcggcccatacgacatgatcggtgcgttcgtgggcgcgggccttggccagtggatgcgtcgccggctgtttgcataccatctgaaccagttcttcgtcacctttgtgtgcgtggccgcggcggcgctcgcctgcaccggcaccctgcgactcatcggcattttcgacccagtcgcgctctcgcacgatacggcctacatcggcgccatgctgttcgtgatccccggtttcccgctcatcaccggcggactcgacatggcgaaaatcgacttcccctcgggcatccagcgcgtggcgtacgtgctgtgcatcatcctgatggccacgctggcaggctgggccgtggccgtgatggtgcacctgcacccggaaggctttgagccactggggcttgacccgtgggtcaacggattgctgcgattcgtggcggcgttcgtcggcgtgtggggcttctccgtgctgttcaattcgccgcagcgcatgtgcctgaccgccgccctgatcggtgcgatcacggacacgctgcgcttggaattgcaagacttcaacgtggcacccgagatggctaccttcatcggcgcgtttctggcgggcattctggcatcggtgtggcgttcatccgtgcgacgtggctggctaccgccgcacctcggctacccgcgcatctgcctgaccgtgccgtcgatcgtgatcatggtgcccggtctgtatatgtatcgtgccatgtggtacctcggcagcttccagaccatgaatgcgctggactgggcgttccgtgcgttcatggtgattatctgtctgccgatcggcttggcgatggcccgcgtggtgaccgacaagtcctggcgctacgacatctgaccgtcatcttggctctcctcaggtggggggagctcggataaaacagcgtctcagtatggaaacggtggaaggtgcttgagcccttgtatccactaccatcaggcgaagtgcgttgcggccgtattcacggctgtgacggtctgtatgacgccgctccggcgtcaatcgcatatcagcacatagttctgccatggcggtagccgcttggcgtcatgattgaggaggggcgcagttggccaacgatttctggattctgctggccatggtcatctattttgcggccatgctgtccatcggattcatctactccaaacgctccaactcctcctccaaggaatactttgcgggcgggcgcggtgtggggccgtggctcacggccctgagcgccgaagcctccgacatgagcggctggctgctgatgggcctgccgggcctggcctacttcactggtgcggccgacccgatgtggaccgccgtcggactggcgctcggcacctatctcaactggaagcttgtggcccggcgactgcgccgctactcggtagtgaccgacgatgccatcaccattcctgacttcttcgccaagcgtttccatgacaagaagggcgtgatctccaccatcgcggccgtgatcatcctggtgttcttcagcgtgtacgtgggcagctgcttcgtgaccgtgggcaagctgttcgccacgttgttcggtttcgactaccacgtcatgatgatcatcggcgcggtggtcgtgttcgtctacaccgtggtgggcggctacttgtcggtggtgatgaccgacttcattcaaggcatgctcatgttcttcgcgctcgcggtggtgttcatcggcaccgtggccagcgcgggcggtgtcgacaacaccgtggaattcctgcgtgccatccccggctacctgtccggcacgcaggtggccgcgcccaagctggacccggccaccggccagcagctcgtcgaggcgggcaaggccgtgttcggcgcgccctccgactacggcatcatcaccatcatctccatgctggcgtggggcctgggttacttcggtatgccgcaggtgctggtgcgcttcctgtccatccgcagcgtggaagaagtgcgcaagtcccgaatcatcgccacctcctggtgcgtgatttcgctgggttgcgcagtgtgcatcggcttggtggggcgtgcgatgatgcccaccgaactgctgacctccaccgatgcggaaaccatcttcatcgtgctggcgcagaccctgctgccgagcttcatgtgcggcgtggtggtctccggcattttcgcggcctcgatgagctccagctcctcgtatctgatcatcggcgcttcggccatgggcgagaacatcttccgcgggctgctgcaccgcaaggccaccgacaagcaggtcatgattgtggccagggtcacgctggtggtcatgttcctgttcggcattctggtggcatacgaccagaactcgtcgatcttccaggtggtgtcttacgcgtgggccgggcttggtgcctcattcggcccgttgatgctgtgctcgctatactggcgtcgcgccaacaaggccggcgccgtggccggcatgctgtccggcacggcggccgtgctgatctggcacaacctcgtcaagcccttgggcggcgtattcgccatctatgagctgctgccggcgttcatcatttcgctgctgttcatcgtggtggtttcgttgctgaccgccaagccgaacaagcgcatgctctacgaattcgaccactacatggacgatccgctgcccggcaccctgccgtccggcaccgtgctcgtcgacgagcccatggaagccatggagtccgaggtccgcagcggcaaatgacacgtgcctgctgtgcggtcggctcgtatggcagaggagtggcttttttgtggttcggcaggaaccattgaggccagatcagccccttgaaatgggttttgaataccgtagcgcggtgcggacggtgcggactgactctaccgggcttattattcctgcgccgacggcgcgattcagcttggacgaatctccatggcgttcatgcaaaggtggcatgatggcgggtatgagtagcttggtgcgtattgtcaatgccggtgttccggggtctcaggaccgcgtggatgtggtgcttcgcgatggggttgttgcgtctgtcagccctgctggaacggtctcggcttcggacagcacgatgcagactaaggcgcatacgacatcgttggaatacgcgacgaatgccattgcttctggcagcgtctcaatcccaacgtcggccgccgcacccgccgacgaaaccaccatcgacgccgacggcctgtgggttattcccggcctgtgggactgccacacgcacttcacgcaatgggctaagacgctgggccgactggacctcatcaatgcccgttccgccgccgaagcgatggacatgttgcgccgtcatctggatgagcgccgcgccgccggcacgcttgacccagatgccttcgtggtgggcatgcgattccgtcactcgctgtgggccgacgacgagcagcccacactggccgcaattgacgccgtgaccggcgaacagccggtggccctctccagcgcggacatgcactgcggatgggtgaattccgccgcggcccgcaggcttggcgtacatgtggacgaatccggtctggtcggtgaactcgaatggttcaacgcctacaccgccttcgacaaggcgccgggcgctgctgaagagactgaccgtctgctgcgcgaggccgaacaggacgccgcaagcaagggcgtggtgggcatccgcgattatgaaatggccgaaaacatcgatacatggatcaatcgtttcgcggccggcattaacggtttgcgcgtggacgccggtgtataccccgagcggttgcgagccgccattgacgcgggttggcataccggcaaggaattgccgggcagcgccgggcttggccatgtgggcgccatgaagctcatctcggacggatcgctcaacacccgctccgcctactgctccacgccgtattcgggcatcgagccgctgacgtatggcacgctgagctacacgccgcagcaaatcgaagactatatgcgcctagccaccgagcatggcttcgacattgcctgccacgccattggcgacgaagcgaacaccattgcgctcaacgcagtcgccgccacgcacgcacatggatcgatcgagcatgcgcagatgctcaaacccgtcgatatcccgcgtttcgccgagctggggctcacggccagcatccagccgcagcacgccatggatgaccgcgacgtcatcacccgtttctgggccaacccggccggcatcccttatccgttcagggccctccacgacgccggtaccacgctgcgcatgggctcggatgcgcccgtggccccgctggacccgtggctggccatttccgccgccgtgctcggcaccgaaagctctgaccgcgagccgttccagcccgagcagtgcctcgatgtgcatacctcgctggcagcctcgaccgccactggccgtgaccgccttgcatccggcgacccggccgatgtggtgttgctggacgccgacccatacgccgccgatactccggaagccatgcgcgctatgccgcaacacgtcgtaatgacattgctgtgcggggagcgtacgtattgatgcaagccatcggcatgaagtgaacagaggtccgtcttgatagccgcgttgcacggaaaaacaagaaatccgcccctcgaagtgaagataggacacagcagacgccgcaatacaaaaacgccgtgtcagttgcccagttggggctgacacggcgtcttgctacgagcggcgggaaaatcagtacttcatgcccatggcctcgcgcacctggtcgagggtctcctcggcgatggcgttggcgcgcttgttgccgtcgtgcaggatgtcacgaatggaatccatgtccttggccagctcggcgcggcgctcgcggtgcggggccaggaactcgttgactgattcgatgacgtatgccttgagcgcgccggcgccggaatcaccgatctcctcggcgatgtccttcgggtcgcggccggtcaccaggccggcggtggtcagcagggcggagacctgcgggcgggcaaccgggtcgaaggtgatgcggcgctcggaatcggtcgggctcttcttgatgagcttggcggtttcctcggcggtggcgcccagcatgatggagttgccgtacgacttgctcatcttgcggccgtcgagacccggaatctccggtgcctcagacagaatggcggccggctccgggaacaccgggttcttcttggcgtaacgctcgttgaaacggcgggcgatggtgcgcgtgatttccacgtgcggcaggttgtccttgccgatcggcacgacattggccttgcagaagaggatgtcgcacgcctgatgcaccgggtaggtgagcagcagaccggtcagcgcgtggccggacgcctccatctcggacttcacggtcgggttgcggtgcagctcggcctcggtgaccaaggacaggaacggcagcagtagctggttctcggccggcacggcggagtgggtgaacatcatggtcttgttcggatcgatgccggcggccatgtagtcgagcaccaggttcagcacgttgtcttggatgtgctcggtggtgtcgcggtcggtgatcacctggtagtcggcgatgatgatgttcgtgttgacgccgcgctcctgcatggcgacacgctcacggatcgagccgaagtagtggccgaggtgcagccggccggtcgggcggtcgccggtcaacatggtgaaggacgacggcttggcctccagcttggcgagcgtttcgtccgaacgctttttggccgcgaggaagctcgcgctcatctcattgcctgccgctgtcagttgctgctcgtcggtcatgcgaaaatcctttgaatatgccctaaataaacgctttttatggtaaaagtgtgagccgacaacgaacaagccactattagtggtactctctattgttgatgaatcgaacagcacagtaatcgcagggggtcagatgggccgcggacgtcaaaaagcaaaacagcagaaaattgcccgaaagctcaagtacctgaccaccgataccgactacgatgagctggcaaaagagctgagcgagcaggagccgggaatgggctctcctgacccgttcgccgacatcgatgaccagtatgcggacaaggatgtggattccgctgctgatgaccacgcttccggtgccgccgaggcagctcccgctacgcaggaggatgacctcgacgagtacgccaagtgggctgccgaagccgccgcaaaggcgaccagcggcgagttcccggcctccgcgcctgccgcaccgaagccggccccgcgcaagccgattccgatgcccatgccttccgcgctcaagcccaagaagtgctgaacgccggtcttctcgtaataatccccttgtgcttggttgagcacaaggggatttgtggttatggctgatggtgccgccgctggtggcttacttacgcttcgcgcctcacagcggcagcaggtcgctcaggtcgtcgcgctcgccgaccgcgctgatgtggccggcgtccttttcctctgcccatgtggtgatgccgcaggccagtcgtagccagacttccgggtccagctcgatgacgtccggcggggtcaggttatgcgggtccgattccgggccgtccaagattttgaccgcaccccacggcgcaacgcgcacctccacgccagggccgggcgcgcgccgctccagcaggaacagcgagtagcgcacggccatcgcccacaccgggcgtggcaaaacaggggagacagtcagacgatgtggtgtgttgtccgccagctcccgggccgcggcacgccattgcaccagcgcgtcatgcccgcgtttcaggtctttttcaagaattactgccatgtatcccatcatggcatcggagccggaagatcttccataatgcaaacgatggcatacggtgtgatgcggaacatcgggacatgtgctacgctctcaatgagaacgtatgcaagagcgctccgccatcgtcgttacggagagttcatgcttacgtctatgcgacgatacctatcgcgcggcataataaacacgggcacttatcccggaaggaaagtcagaatgaccgaaatcaccgcaccgaagtctcctgtcacggcggaacaattcgccgacgagattcgtgaacaactgaaatacactcagaacgtcaccaccgagcaggctacccctgctgacgtgtatgtcgccgcatccaaggccgtgcgcaaccaccttgccgactcctggttcaagacccaggccgacaccgtgaacggcaacaccaaggccgtcggctacctgtccgcagaattcctgatgggtaagcagctgcgcaacgcgctgctcaacgccggtctgaccgagcagttcgacaaggctgtggaagcccttggcttcaagccgaaggacatcgtggatgccgaatacgagccgggccttggcaacggtggccttggtcgtctggccgcctgcttcatcgactctctcgcctcgctgggcgtgccggccttcggctacggcatccagtacaagtacggcatcttcaagcaggagttcgacaaggacggcaagcaggtcgaaaccccggactactggctggccaacgaagagccgtggggccacatcgactacaaccgcgaccagaaggtttccttcggcggcaaggtcgtcgagaacgccgacggcaccaagacctggcagcccgcatggtccgtgcgcgccgtgccggtggactacctggtccccggctacaagtccggccgcgtgaacaccctgcgcctgtggagcgccaagagctacgacgagttcgatctgctcgccttcaaccgctccgagtacatggaagccgtgaccccgcaggtcaaggccgagaacatctccaagattctctacccggaagactccaccaaggtcggcaaggaactgcgccttgagcagcagtacttcttcgtctccgcctccctgcacgacgccatccgcgtcttctacccgggccaggacaagccggatctgacgactttcccgaacaagatcgtcttccagctcaacgacacccacccggtgatcggcatccccgagctcatgcgcatcctcatcgatgagtacggctacgactgggataccgcgtggtccatcaccaccaagaccttcaactacacctgccacaccctgctgccggaggcccttgaggtctggccggccagcctgatcggcgagctgctgccgcgtcaccttgagatcatcgagaagatcaacgcgcagttcgaggacgagctcaagtccaagggcgtcgacaagaacaccatcaaggacatggccatctacactggcgacgccgtgcgcatggcctacttggccacctacggcggctcccacgtcaacggcgtggccgagctgcactcccagctcctgaaggacgtcaccctcaagaacttctccgacgtctacccggacaagttcaccaacgtgaccaacggcgtgactccgcgtcgcttcgtcaagctcgccaacccgcgcctgtccgacctcatcaccgagggcctcggcaccgacaagtggctctccgacctggagatgctcaagggcctcgagccgctggccaaggacgatgaattcgtcaagaagttcgccgccgtcaagaaggccaacaaggtcgacttcgccgcctacgccaagcgcgagtacggcttcgagctcgacccgaacaccatgttcaacaccatggttaagcgcctgcacgagtacaagcgccagtccctgaagatcctgtccgtcatctccacctacgccgacatcaagtccggcaaggtcaaggccgaggacgtcaccccgcgcaccgtgttcttcggtgccaaggccgccccgggctactacctggccaagatgaccatccagctcatcaacaacgtctcccgcgtggtcaacaacgatccggacgtcaagggcaagctggccgtgtacttcccgtggaactacaatgtgcgcctcgcccagcacctgattcccgccaccgacctcgacgagcagatctcgcaggccggcaaggaggcctcgggtaccggcaacatgaagttcgccctcaacggcgcgatgaccgtcggtacgctcgatggcgcgaacgtcgagatccgtgagcgcgtcggcgccgagaacttcttcctgttcggcatgaccgtcgacgaggtcgagaagaagtacgccgagggctacaatcccgcctcctactacgaggccgacccgcgcctgaagcaggccatcgatctggtggccgacggcaccttctccaacggcgaccgcaacgcctactccccgctcgtggccgactggctgaccaaggactggttcatgaccttggccgacttctccgcctacatggacatccagtccgagatcgaggccctctacgctgatgagctcgaatggaaccgcaaggccctgctcaacgtggccaactccggctacttcagctccgaccgctccatggaagactatttggaacgtatctggcacactgctcctctggcctgacggccgccggagcataagaagccccgcaaccgacatccatcggttgcggggcttcttgcgttgaaagaccgccctatcaggcttcggccggggcggctttcgcctcgtcatcggcctcatcctcggccttattcagacccaggtcgaccggcgaggagctgttctcccacggctcctcccacggatcgtaatccgggttctgctgcttgtagatgtacaggccaacaagcgcggcgagcaatccgccgaacagcagcgcgaagaacttccaaccgttagaagacttgttctccatgacggctcctttccctagggatcgtctggtcggtatgcccattcagaccgactctgctccctattctaggccgctgtttgtgacgattgggtggaatgacattcgtgggcgattcatccgcgcccgtctgcccttggccggctcggcatcttcgcggcgcgtggaacgcatccgagaccttcgatacagtgggctgcatgcatattcctacacaacgggagattcgataccagtgggagcgcggtggtccggtgatgacctgggcgctgattgttgcgtgcgtggcagtgtggctactggaggtattgttgggatttattgccccgggcctgagggcttggttgatgtacctcggcatggcggctccggtcagactggtggctgagccgtggacgctcatcacctcgatgttcctgcatgcgccgaactcgctattgcatatcctgttcaacatgattgctctgtattccgtgggcccagtgctggaacgaatgatcggccactggcggttcttgggactgtatgtgatttccggccttggcggctccttgggacttatggtgtgggctgcggtggctccgggaggcatcggctggcagatggcagcctatggggcttctggagccttatttggcctgtttgcatcattgctggtggtatatcgccgtatcggcgccgatatccgctccatgttgatctggatggcggtgaacttcgccttgccgttcgtggtcggtggcgtggcgtggcaggcgcatgtcggcggctttgtagtgggtggaatactcacatggctgctggtgggtggtgtgccggcgtggcgcggtaaaagcctgaaatggcgcatgcaggtgtacggctgggccatggtggtgctggtcattgcgttgattctgttgtgcaatatggccaatccttacgggtggatgagtttcggctccctgcactgatatggcttgatatggctgtaaaaaaaaacgattgatgccgggtattgcggaacatgcagtgcccggcatcaatgtatgtgcggaaagcgacgatgtggatattagcgatgtggatatcgtcgttcggcgagtgggtgtgtgccgtatgaagatatccacagtaatgagatgcgcgcaatgacgagttatccacgataatgagttatccacaatggtgacttgtgcacaagtgtgtagaaaagtgcataagactgtggataacttatgtggataagttaggaatgccgcggtattattgggtttgttgcagtggataactcgggtgtataactgttccctcgctgtggcgatgtatgccaagccaaagttatgcacgagatatacaccgagaaacgccgcttatccaccacttatccacatggttttccacattcggtggaaaactacatgggtgtaattcatccacaggctgtggataacgtagtggataagtcgtggataagtggtggatagctgtggatgaacaggctaaggcacgaaaaaggccgacctccgcatacgggaggtcggcctttctcataagaattaaggacaacctaacgatagaaaaaacaatctaccgatagataagcgcaacgagccggaactcagcgccatcccatcgtcatcaggaatccgatcatgatcagggcgaagccgatgccgaggttccacgcaccgatgttcggaatcggccaggaaccggacggggagaggtagtacaccacgcaccaaatcaggccgatgatcataaacgcgcagaacagtggcacgaaccaacgcgggttcgacttggtgcccttaatggtttcttcaacgcgcttggtgttctccgcctggcggttcatcatacgctgcatctgcggggtcagcgtggccttatcggcagtggcgttgagcacggcctgcacctgctccatattcacgccgtaagccgcgccttcctcggcagaagcgttctctgcgttctgctcggtgtctttgctggcggtctcgtcagcaacggtgctggatgaggtctcgctctgccagtccttctggttgttcgagtcggtttcgtgcagctcttcgtcagccatcagcatagtctccattcaataggctaaaagtcataatagtggctacactcgaaagcggcgaccagagtcggcaagaagacaggaaattcatggccagacatgtaggtaagcacggtgcacggcactccctatggggtggtgtcgcggtattcgtcgtcattgccttgaccggttttctgctgagcaccaacgtgagggtcaatcgtacggttgccgtcaccaacgatacggctgatctggtggagcaaggcgtggacgaggtcaaccagctgcagcaggacgtcagcgatctgaccgaacaggtcgccaatcttacggacgcgctcaaggccgatggcaccgacagcacacagaaccaaggcaaggactccagcaatgtggattccagcctgatgctgcccgcgctcagcggcagcggcgtaacggtaacgctggatgattctccgttgtgggagaacgcagtcaacaacaacggcacgaccgccaatatcaacgattacgtgatccaccagcaggacgtcgaatcggtggtgaatgccttgtgggccggcggtgccgatgcgctgatgattatggatcagcgggtgctgttcaattcggcggtcatctgttccggcaacgtgctgtcgttgcacggtaagaaatactcgccgccgttcaccatttccgcgattggtgaccctcaaagacttcgcgcagcgttgaacgactccgaagccattaccattcttaagcaatatgtgaccgcgtttggcattggctacaaggtggagaatgccgaggaccttcagttccccgctaccgccgccttgctgcagcagttgaaatatgccacggtcgatacgtcaaagaccacagatgaggagcagactcagcaatgagacacggcaggcacaacagcggcgtaccggcgcccattgatctcgcgtccgtgtcggacgtacagcccttccccgaggacgatgccgcacgaatggcggcagacccggccaacgccagtagggcaaggtcccgtcgtgccgcagtacgcggcgcgtcttcgccccagcggagcccggcctggcaggcactcggcatctgcgccgaactgctgattaccgctgccgtgatttgcgccctgtacatcgtctggcagatgtggtggaccggtgtcgaggcggagcgagcccagaacgaaaccacccagtccgtcgactggagcgaccccagcaacaacgggggaacggtcaccatcgccaaagcccaggagggcgatgcgccggtacagccgaaagacgcgaaatatggcgacttgattgcgcagatctacattccgcgcttcggctcccaatggcaccgcaacatcgtggaaggcaccacgctcgagcagctcaatcgccacggtctgggccattacgacaccacccagatgccggggcaggtcggcaacttcgccgtcgccggccaccgcaacggctacgggcagccgttgggcgatgtggacaagttgcaggaaggcgatcccatcatcgttcgtaccaaggattactggtacgtctaccactacacccggtacgagattgtactgcccacggacgtgcatgtgatcgcccccaatccggaagactccactgccaatcccaccaaacgcatgatcacactgaccacctgtgagccgaaatactccacccccacccatcgatggatcagctatggtgagttggcgtactgggccaaagtgtccgatggtgtgcccaaagagctggctactactgattcgtccggtgcagtgatgttctccaccaccgaaaccccctcgatcgcttcccgcattggctcgctggacaaggtggtattcggcgcgctggtagtgtggctggttctgttcattgccgctgcggtggcatggcgctggccggtgctgcgcgagattcgcgcgggtgagcgtcgccgtccggatgccagcatctatggcggactgttgcgtctgcagcccggcgtggcgccgattcgatggctgctgctggctctgctgctgttcgcagccgccgcggcgctgttccagtggggattcccttgggccgccgccaatatcccattcctacagcagatgtcgaacttcgtggcagcgagctgacggcatcctagtactatggcttgcagtacacgtccctcaaggagagccctatgaccgattccgcgcatattttggtggtggataactacgattccttcgtctacacgatcgtaggctatctgcaaacccttggcgccactgttgatgtggtgcgtaacgacgctatcgacccagccgcgccgggtgtactggacggttacgatggcgtgctgatttctcccggccctggtgctccggccgaatccggtgccagtgaggatatgattcgcctgtgcgcggccagcggcgtgccgatgtttggtgtgtgcctgggcttgcaggcgctcgctgaggtgtacggctgcactgtggaccatgcgcccaccatcatgcatggcaagaccagcttggtggaacatatcgatgacgagattttcgagggcgtggccaaccccatgaccgccacccgctaccattcgttggctgtcgagcccgattcggtgccggatacgctggtggttaccgcgtggacgcaaggcgaccacattattcagggcgtgcgtgtcaagggcaagccgatgtacgccgtgcaattccatcccgaatccgtgatgacccaggacggctaccgtctgctggccaactggcttaaggtctgcggccaagacaacgccgtggccaagtccgccggcctccagcccaaagttacgaagtagcttttccgcgcggcgatactctccccggaatgtgtcgctagaacgaggcttgcgtactggttttgcgacgcttcccgggattgttgcgctgggatagctctttatacagcaaaggggaggggcgcagaagcccttcccctttgtgttgcgtgtatgtgttgcgctatttgcgttgcatatgcgcaacacatacacgcccggcgcttacttgctactcaccggttcactcaccggttccgcccccgttgccagtaccgttgccaccgtctccggtaccggtaccgccgccagtgctgccggccttcgtggtaatggtgacggtcgatcccgcatctacctggctgccagcgccaggattgatgctgactaccacagcggtgctgccggttggaccattggcctgagccttgaggcccacggccttgagcatgagttcggcggtgacgtagtcagtgccagcggtgatattcggcacagcgaccttctccttgcccgtggacacccaaatggtgatgaacccgccctgtgcgatggaagagcccgaatcagggcttacacgggtaatcagaccggcctccaccgtatcggagctctcctgctccacagtgaagctgaacttgccctcatactgctgtagcacgctgtccttcgactgaccgaccaaattgctcggtacggtggtcatgccggaagaaacatatatggtgatggtggtgcccttgggaaccgactgaccggcggcaggatcggttttcgtcaccatatccttggcgatgtcggcgctgtcttcggttttgacggcggcgttcaccttgaacccggcgctttccagaatgctgcgcgcctcttcctggctgcgttccttgacatccggaacctgagtggactgcgggcctgcggagaaccacaccttcacggcagatcccttggccaccttggagccggcgtccgggctcatcttggtgcaggtgccttccggctcggtggagtcggtgtcttgcttttcggtcatcttcaaacccgatgccttgagtttgagctcgatgctgtccttggatgtggaagcgttgcacacctcagggatggtgacggtgtcttccgaggacttgttgccggagccgttcatggcgaacacgatgcccacaatgacaagcactgcaacaatcgctgcgatcaccgaaccgatgatgatcttcttgcgcttcttggccttggccgccgccgcacgctgctgcgcacgggactgcaacgccgctgagttggcaccattggccggtggaatctgctcgaactgaccggtcaccgggttgaatgcttgggtgggttgctgatgcggttccaccggcgtggtgggcaaatcacgttcggcttccttgcgggccttcatattcgacaggtccgtcaacgggttgaacgcggccgccaccggcacgccgccgttcatgtaggtcaggatgtcggtcttgaattcggaggccgtggcatagcgattctggcggtccttggccatggccttggcgcagatcgaatcccacatcttcggcagccccggcaccacggcggatggcggcgtggcgacttcggaaacatgctggtaggcgatggccacggcggaatcgccggtaaacggcgggcggccggtgagcatctcgtagagcacgcagccggcggaatacaggtcggaacgcatgtcgacggtctcgccgcgcgcctgctcgggagaaaggtactgtgcggtgcccaccacgccctgcgactgggtcatggtggctgcggaatcgtccagagcgcgggcgatgccgaagtccatgaccttgaccacgccctgctcggaaatcatgatgttgccgggcttgatatcgcggtggataatgcccatgcgatgcgaatagtcgagcgcgttaagcacgcccaacatcacctgttcgcagtcgcgctggctgagtgcgccgttgaccttgatgatgtcgcgcagggtctggcccttgacgtattccatgacgatgtatggcagacgctcggcatcgccgctttcggaagaaaccagttcttctcccgaatcgtagatgttcacgatgttcgggttgttcatctgggccacggcgtgtgcttcgcggcggaaacgggccaggaagatgtcgtcgttggccagatcggcgcgcatgattttcacggccacggtacggcccagacgggtgtcaagagccacgtggacctcggccatgccgccacgaccgatgagctggccaagctggtagcgtccgccggccaatgcggtgggcatactggtgctcattgcttattccctcccaatcttgaggccggggcctccaaaacaatgcgtggcgtgctggtcactcggcgcggcagtcgattgccggacgtggccatggcggtgtcggccatttcggtctgctgatccagcagacggcgttcgatgcgtgccagcgtacgggacaccaccagcgcgtctttcgggcgatccaacgggtccttggccagcattgacatgacaaattcgcgtaactggacgtccaccgagtccggcagcggaggcacgggattgttcacgtgcgctgcggcgatatcgaccggagtggtgccggtgaacggacgatgcccggcaaggccctcgtacgccactacgcccagtgaatagatgtccgattgcggcgtggcctgctggccctgcgcctgctcgggggagatgtattgtgcggtgcccaccaccatgccgtcctgggtgatctggccctgacccgtggagtagctcacaccgaaatcggtgattttcacttcgccggtgtcggaaaccatgatgttggccggcttgacgtcacgatgaatcacgccgtgcgagtgggccacgaacaggcctcgcgcggtctgaatcaggatgggcagcagttcgatgggatccatcgcgcccttgctgtggaacaggtccgccaacgatttcgaggggacgtattccataatcagaaagccgatgccgtcatgctcgtagtattcgaacaacgcagcgatattcggatgcgccagattggcggaattatgggcttcggcacgcagacggcgtagcttggcctcggcgttggtcatgtccgagcgcagcgccttgatggccacttcacggccgagctgaatatcgtagcctttccagacctcgcccataccgccttgcgcaagacgcgaatcaagacgatatcggcggtgaataagctgtccttcgataagtttcactgctgcaaagcctcctgcatcatcgcgcgcatgatcgggccagcggcgagcgaaccgtgtacatctgtgttatgcaccaacaccgcgacggcgatttgcggatcgtccgccggcgcgaaaccgatcacccagccgtcgatggcagagttgtcgataccgatttgtgcggtaccggttttggccgccaccttgatgccgtcgatggccagctgcggattggcctcggacaccacgctttccatcatcgtggtgagcttgtctacggaatccttgctgaacgcattggccatggtctgcggcttggtctgcgaaagcacggtgagatcggcggcgcgcacacgatcgaccagcgtgggctgcatcagtttgccgttgttggcgattgcctgcgcgaccatcgccatctgcaacggcgtggccgtggtgtcgccttggccgatggacgccagcgcaagcttgtcgtcggtcggatcagaggggaatgtggacgcggtggccgtcatcggggtgcccgtggattcggtgccgtcaatggtgatggtgctgccgaaaccaagcttggtggccatgtccgaaaccttgctcgcgccgagtttcacgccaagctgggcgaacgcggtattggacgaccatgcgacggcctcttgcagggagatctgcccgttgacgccatcgcccggtgcctcgtcgttcggcaactgtgtggcggttcccggcaaggtatagctggcgcccgcaggaatcttcgtgtccgtctgataatcgccggtttccagcgcagccgaggcgacgatgatcttgaacgtggaccctggtgggtacagctgcgaggtggcgcggttgattagagggctattttggcccgcagaaagttcgttgtaggcctgagacgcggctttggtgtcatgggtcgccagtttgttcggatcataactgggcgtgctcaccatggcgaggatacggccggtgttgacttcgatggccaccgccgcaccatcgcgcgtaccgagctgatcgtaggcaacctgctgcagcttggggtcgatggaggtttcgatggacgcgccctgattcgtagtgccggtgagcatggccttggcccgctgccagatcaatgaatcggcctcaccgttgagcagcatgctgcgggaggcttccaggccgcgatcggcggtctggttgatggagaagaagccggtgaccggagcatacagaggaccgttggaataggtgcgcaggtatttgaacgcgtcgttgaccggttcggatttggccatgaccgtgccgtccgaggccagaatggcaccgcggtaggcaccgagctggtggtacagcgaacgggcgttgcgcggatcgttgttcagcgcgttggcccgtaccgccatgatgatggtggacgacaggccgagaatcacgaacagcgctaccacggcggtgaaaagctgacgaagatatttgttcatacgcgagtgcctccgttaacgggaggaagcgggggaatcgtaccggtaggcgtgtacggttcatcggcgccggcatacgacggagtggtggtatccacgatggggtcgtcaaacgattccgactcggactgcgacgccgtagccgacgcgctgcgaggctgaacgatcggctcagtggcgcgggcccgggcctcaagttccttgttgcgcagcacggccaaagcctcgtactggaacgtatccgaggtcagctccggctcgggcgcattggccgaattcgagatgatgatgagcagggtcgcgagaatatagttggcgatcagactggagccaccggccgccatatagggcagggtcagaccggtcagaggaatcaccagcgtgatgccgccgaccacggtgaacacctggaaggccatggtgaacaccagtccggaagcgagcagcttgccgaagccatccttgattttcatggcggtgataaagccggaggcaatgatgagcaggtagagcatcaaaatggccaggacgcccatcagaccgagttcctcgcccagagaggcgtagatgaaatcggagttcgcaaacgtaacgagcgaaggatggccttggccgagaccggtgccgagcatgccgcctgatgccaggccgaaaatgccggtgaccagctgccaggagccgccgggggtcttgttgtattgctcgttgctgaacgggtgcagccaggcatcgactcgctgacccacgtggctgaacatgcctgcggccagcacggcacccgcggcgaacgcgatcagaccgatgatgatccagcttttacggccggtggccgtgtacagcatggccacgaacatggcgaagaacataagcgaggtgcccagatcatgctgcatgatgagcacgcccatcgaggcgatccacaccacgatgatcgggccgagatccttgatacgcggcagctgcagaccgagcatcttcttaccgcccacggccagctggtcgcgatggtcgaacaggtaggcggcgaagaagaacgcaaggaacagcttggcgaactcgcccggctggaactggcccagtcccggaatcctgatccaaatgcgcgcgccgttcacttcctggccgacaaacggcagcatcggggcgagcagcagcaccaagcccaccaccatcgacacgtaggagaagcgccgcagcacgcggtagtccttcaggaagatgatgagcagcgcggaaagcacgatggcgatgcacagccagatcagctgacgttgggcaaccgcccaaccttcgctctggtcaatgcgagcgatcatggtcacgccggtggcggtcagcagtagcacgcaaggcagaatcgactggctggcgtacggctggaagcgcacaatcagcccccacagcaccagaaacagcactacggccaatgccagcatgccggcgtattgcatagggaattcgccggcggtgcgctggaacatctggatgaacgccaacgcactgattgccatggcaatcagcaacaaagaaatctgacgtagacgggtaacgatcattgagaatctcccgtggccgcgttgtcggccgctccgataccggatttatccgaggaatcggatgagcttgacgaaccggacttgtctgacgaggagccggactggctggacgaatcctcggtgctgtccttggaatcgctctgggagctgtctttggaactgtccggggaattggacgcctcggccttcttggcggcgtcggcttcctgctgcttggccagtttgcgcatttcggtgcggataatacccacatgcgactgcgcttcgtccaacgaaccgactgtgatgccttggctcagctggtcacgccatgtctgaggcaggtccgcggtggcgatattggtggtctgcacttcgtgcgaaagctcaagtccaaagagattggtcggcacgccacgataaatggccacggtgccgttgctatctcccacgtagtagtgcgtctggctccacgtgtacgcgccccagccagcgccggccaatgccagcacggcaagaatgcaggtaataatcaccgcaagcttattgcggcgcttcttggtgcgcgtggccttcttctgctcgacctgctcatcgcggatggctttggccacatccgggtcgttggggtcggcggacaggcgcccatccggcttttgcaccaccggaatctcaccggtatcgggattggctcgttcaccggtctcctcgcggacggtggacggctgcaccacgcgtgtggacgacggtttggccgtggtttgcgcggtctccgcctcgtgcgcgctggcgggctgaatcaatgctgcggcgcgctgggcgggggaatcatcctcacgcagtgcgggcgcggtagccaccggctcgttgacgatgtcggcaatcggctcaagattacggctggcggcaccgccgaccaacggcgtttggtgcggcaggtcgaacgcatcggcatccaacgccaacgtggcatccgcaataacggccgtgacattatcggtgctgcccgcccgcagtgccatctgcaccagacgctgcacgcattcgccctgatcggacagcgtggtcatcgtctcttcgatggtggaatcttccagcacaccgcacaggccgtccgagcacagtagccaacggtcggcggggtgggctcggcgaaccgaaatatccgggcgcgggtcaatgtcaaagtcgccaagcacgcgcatcacgacgttgcgctgcgggtggttcttggcttcggacggggtgatacgaccggtgttgatgaggtgctgcacgtagctgtggtcgcacgtgatgcggctcaggcgtccgtcgcgcagcaggtaggcgcgcgaatcgccgatatgggcgatgacccagtagccggccaccaatgccactgcggtaacggtggtgcccatgccggcaagcttgcgttcgcgcttggccttgccgacgatggcgtcatgcgcggccataacggaggtttccatcatgcgggagatcgtctcgacgttgccaccggtgtcatcctgctcgatgtgggccagcgaccggatggcgatggaggatgccgtatcgccgccggcgtgaccgcccatgccgtcgcacatggcgatgagatgctcgccggcgaaggaggaatcctgattgttcgcgcgcacggtgcccacatcggacaccgtggtggaatacaggaacagcggttgtgaagcggcggattttggcatgcggctacctcagttcgaaggtggtggcgccgatgcgcacaggaatacgagcgggcagaatggtggggcggttgatgcgctgctggttgaccacggtgccattggtggagttcaggtcttcaatggcccactgcccggagcgcgtgtcacggtagacacgggcatggtgggaagacacgaattcgtcatcgagcaccacggtgttcgaggcggcgcggccaagcgtgatgtcggcttcggccagcggcacggagctgccggcaagcggaccatcgatgatgaccaacagggtaggctgcgccgaggcggcggacgacgcggaagcgctgggctggcgatgcgggcgcggcgcagctgcctgcggcgtttcggccttggccttatgcacttcacgctcacggcgacgacgcgcgcgcgaaggtcgcggactgaacgtctcgatgtccttgcgcagcgaacgtacggccagccagatgaatatccacagcaggatcaggaatccatacttgagcagggcgaatgtcagttcggtcataagtggacgactttcgggcgtgtgctcgactactcctgggcttgggcggaggcccagtacaggatgcgggtacggccgatggtgatggtgttgccgtcgagcagcgtggcggcgggcacttggtggccctccacgtacgtgccgttggtcgaacccaggtcgcgggcgatcacgccgttatccgtgatgtcgatttccaggtgcttgcgggagatgcccggatcgtcgatgacgatatcgcaaccggaaccgcggccgattaccgtcttgtctttggtgagcaggtactggttgccgttcacctcgagcaccgggctatcctcggtctgcgcatcggtggtgaccggcacggcattgccctgcacggattcggaggtgaggttgaagttgcccttggacaggtcaaggtcttcctcgaagatcacgatcaccgggcccacgaaggcgtaatgctggctcttcgcgtactcggtgaggttatcggccagttcgttggccagggtctcgctaccccatgcctcgatacggtcgaagtcaggagtactgagcttgaaacggtattcattcggggccaccgtgcggtcacggcccacgggcatggcctcggcgtcaatctcgcgctccaaggcgctggaaagatcgacaggctgcaggtctttggagccaaacttggcgaatactccgttgactgcaccctccacgcttttttcaaaacggtcgagaacgctcatagtcctccctttctaatcttcacccatcctacgcggtgatgggaatatgagacaaaaaaccggtctttcacgtgacgatgagtgcaaaatatccaaaaattcagggcggaaatgggtgcggcgcaccacccgaggtgctttaccggtggagcacctcgggtgggatgcgcgtgttatcgatttgtcaggccagcgcgtcgcgcaggaaatcgcgctggagggtgagcaggttttcggccacggtctcgtcattggtcatatgggtgatgcccgtcaacggcaggaaggtgtgcgggcgacccgccgccatcagggcttgcgagaggcgcaggctgtgggcgatggtgacgttgtcgtcggcgaaaccgtggatcagcataagcgggcgctcgagtttcggtgcgtcctgcacgatgccgtttcggtagtagacatccgggtcgaggcccagatagcgctcggtgtagtgcgtgtcgtacagcgtccagtcggtgggcggggcgccggcgcatgcggccttgaacacgttcggcgcgtccagcacggccagtgcggacaggaagccgccgtacgaccagccgatcatgcacaccttgtcgaggtccggcatgggaatcgcctcccgctggcgggaggtggcgcgaagcgccggtgggtggttctcggcgtctgcctgatcgcccgcagccggctgtgccgcacgtgattccacatcggcgttgagccgggcgacggcctcgggcagggcgttgacggcctcgacctgatcggccagcgttacgtccttcatatcctcgaagatctcgcggtcccatgccgggccgcggccggtggtgccacggccgtctgccgtgaccaccaggaagccttggtcggcccaccactggccctcccagtagaaggactgcgaggcgatgacctgctggaagccgggcccgccgtacggcttcatcagcaccggcagcttctcggcgtgcgcgtacgggctttccgggctcggcgcgatgatcgccgtgtacagctggtgctcgcccagtcgcgtaaacgtgacgttcggtgtaaagccgggttcggccgccgtggacgcgatagtggcgctctgttctcccagaatatgccgcatctgggcgcgggcggaacgcatatcgcggccggagaccacgatgccgcgctcgccgcgcgaggcggtccactggccgggatcggtcgtgaccggcgtgatcgtgccgttgtaatcgatactcaccacgtcgaaactgcgggcgtcgtggtcgccgaatacggactcggtggcggccgcatcggcccaagcgtccggcacctcaggcgcgatttcgggcgcgcgctgcaccacggccagcacatcctcgtcggtcacggcgagcaccgtgcgcacgttccagccagccggcgtgaacgggcggccgtccattgtcagacggttggtgtccgtggccatatcgttgagcgagcacaccagacgaccatccggcgtgtaggcgggcgtgccgtgaaccaggtcgatccactgctcgttcgcgtgctcctcaagcacacgcgtggcacccagcgcggccccatccgccgcgactgccacctcaagcacctgatcgcgggtctgacggcggttctgcaccagcaccagcggatcgtggccgcgacgccagttcacggcggccacatactcgtacgcctcgcgatcccaatccacatcggcgttgccggtgatgcctgcgtaccggtcgttctcatcgaacgccagcgtgatcacggtcagatacacgtcggcattgcgggtcagcgcgcgcgggtaacggcggccggcgtccggcttctcggggtcagccggatcgctgatgtgccaggtcggctcgtcggcggtgtcgaaggactcgaacagcacgtgctgcgaatccggggcccaccagaagccgtcgtatcggtccatctcctcgccggccacgaactcggccagaccgattttccacgtgttttcggccggattgccgtcctcatcctccacgctcacgccgtagacggcggtgatgcggtcacctagttcgccgccgatatcgaccagcatcaggtagctgcccgtggtgtacagcacatgttcgccatccggggcgatgcgcgggttcagcaccggcgtgtacatcgccgggtcctcatcgagccattcgccggccagttcacgggtgtgcggctcgggtgcgccggtctcgtcattccaatcgatgtcggtcaggaacaggcggccgttgatggtgaacacgatgcgattgccgtcgtcatctgcggagtatccgacgatgccggtgccgccttcgcgcgcacgctcgcggcgggccttctcctcggccggcacgtcctcgctgtcggcggttgcgcccagcagttcgcgcgggtcggccagcttggtctcatggtgttcgccggactcgtcgaaccagctcagccacagtgcggtcaccagatcctcggggccgtcggagcgcaggaacagggcccgcgagccgtcgcccacggtctgtgcggagcgcggtgcgccgcagccgaagcgcagcgtgcgcgcccggaggcgtgggaaatgcttgattgcgtcattgacatcattggtttcgctcatacctcacaacctacgcgcctgtgcggtcagtggcgcgcaggcttgcgacgcattcccgggaatgtgtcgtggtgtgggtgcgaggtgtgggcgtgaggcttgtcctaagatgggagccatgcaggtgacgatgatcgacgaaaacaagtacgccgaaacgatgaccgacgtggtgctgcccgcgctcgaacaatgctgcgaggagggctggttcgatccgtccgccgccgaacgttcggccgggatcgagccgctgtccggcattatggacaccggcggccgctcgggccagctgcactacctgtgctacgactccgccaaattcgacgcgattcgcgagcaaggcgccaccgccaccttccgcggggccatcgtcatcagccacggcttcaccgagttcgccgaaaagtacgacgagctcgtctggtattttctgctcgccggctactcggtgtgtgtactcgagcatcgcggccacggcaagtccgcgcgcgacgtggacaatcgctgcatggtgtggattgatgactggcagcgctacgtggccgatctggccggcttcgccgaaaccatcggccagcagtacgcggccggcatgccgctgaacctgttctgccattcgatgggcggcggcatcggcgcggccgtgttggagcgataccccaccctgttcgacaaagcggtgctctccgccccgatgatcgcccccgccaccggcatgccgctgggcgtggcccgtgtgctggtcggcgcgctgtgcggactcggcttcggcaagaagcgcgtgttcgggcagtcgggcttcacgccggaattctcgatggaaggcaacgagggcgcttccgaagcgcgtgaacgctggtacttcaagctgcgttgcgagaatagcgaataccagacctactgcgcggcgttcgaatgggtgcgccaagcgttgaagctcaaccgggccatactgaatccgtccgcctgcgccgaagtggagacgccggtgctgctcttccagtccggacgcgacatctgggtactcaataagccgcagaatcacttcgtccaactggtcaaggacggcggcggcgaggcgaacatcgtgcgcttccccgaatcgcgccacgaaatcttttccatgcccaacagcacctacaagccctacctcgaaaagatcctcggcttctacgacgaccccatgattgcctgcgccgcgtactgatgtagctcttcacccattgttcaccgtgcggtcaccttgtggcccgacccgctttagatggcgggagagccatggaattatgggcataatgtcttctctccgccgccgcggttgcggccgcggtatgtgccggcgtgctcgcgttgaccggttgcacggcgttcaataattccgatgacggcacagcggacggcaacggcacgtccgccaccacgcagaccttccagccgtccggcggcaaaccgactgccaccctgagcattgcctccggctccgaaaacaaggaagtcgccgtcgccatccagaaagcggccgaccaatccaacgtagccgtgacgatgcactacatgggttcgctggagattatgaacgcgctcaaggccggcggccaggatcacgacgccgtctggcctgcctcctcgatgtggatttcgatgggagacaccaagcacatcgtcaaagacgcggccagcacctccaccacgccgatcgtgttcggcatcgccaaatccaaggccgtcaaactcggctgggctgacgacaccggcgccaccaagcccgtctccaccgcggacatcctcgccgcggtcagcgacggcaaactcacgttctccatgacctccgccacggtgatcgacagcgcgctcaacgtctaccagaccgcgctcaggaagcccagctggaccatttgggtggtcgattactccggttcgatgtctggagagggcaagaacggcgtggtcaaaggactgaacgcggcgctcgacccggaccaggccaagaagtcgtacatcgagcccgccagcggcgacgtgaacattctcatcccgtttgaaaccgaggcccaccgcccggtcaaggccactggcacaagcaccagcgacctgctgcatgaggccgatgccaccgatgccagcggcggcaccgatatctatgaaggcctgctgagcgcgctcgacgagctgcccagcgagtcggaagcctcgcaatacaccaccgccatcgtgctcatgaccgacggccgctccaactccgatcatcaggatgaattcgaaagcgcctataagtcgcgcggccgtgatctgccgatcttctccatcatgttcggcgatgccgatcccagccagctgaagtctctcgccaccctgagcaacgccaaggtattcgacggccgctccggcgacctcgccgccgtcttccgccaagtcaagggcttcaactgatgctccaggtaatctgtggattcgttgtcggactgctgctcgccgggctcggtttcggactggtcggcggcggagtgcccggcctgatcgtggccgtggtactggccgcacttgggtatatcgccgcctccacgctcaccgagccggagcgacgcatcggcaaaatgctggtttccgccttgcccaacggtcagaagaccgccgatacgatcgacgcggcgaacgctcaactcaactcgatcgccatgctcaccaagcaagtacgtgacccagccgtcaaagccgaagccaacgacttcatcgccgctaccaaagattgagtgcaatacgtgacccgagacacctccgcctacccgacgttgcgccactacatcaccgtgtacggcgagcagaccgagaaactgttgcgctcctacgtggacgtggaaagttccggcgcacgcgatcagatagccacggtacgaatcgaaaccatcgaggcgctgcaagtgctcgaacagaccgccgccggcgaactcagccgggcggtaagcgccaagacgttgggcattacggccgactccgacgccatccaacggttggcccgcatggatggatacgacgacgtcgcaccttcgcctgtgccttccttggctgctgatgaaggacggcatgcgcccagtcagactccatctggtggcccggctcaccagtcggaccagaaaacggacgcacaatgaaactctccaaatcaaaaatcatcggactgatcgccctgcttgcggtagtgggcgtggtctgcggcacgctggtgtggcggcaatcgcaaccagcgccggccgaaccgaccgaacaggtgagcatcaccggctacctgggcggcgagaaaatcggcctgttcgatgacgccaagttcaaggcgctcgccgccaagcaaggcattgccatcgactatcgcaaggccggatcgctggccatgatggatgcggaccggaaaggcatggattacctgttcccctcctcgcgcgcggccgtcgaatacggcaatgcgaaaggcgtcaaggcccccccccaaagcgacatcgtcttcaactcaccgattgtgctatacacgcacaaggccgtggcggacgggctcgtgaacggcggacttgtgaccaaggacaattcgggcgcgtatcacatgtgcttgatttggccgtgaaccagacggatgcgttcaagcagatcaaggacgacgtggtcatcgtctacccgacgccgaccgtgtggagcacccacacgctgatggccttggacgagaaaggcgacacactgctgaacctgttgaaaacaccggcggcgcagaagctggcgtgggagcgccacggcttccgcgcggccaacttcgccggcaccgattcgatcagccgattcggcgtggccggcacgctcgaccagatcccggccgtatccgaactgcccaacaacgacgccatgcaacacctcatcaccaccctccaatccgcgcaagccaaactcgtggccgacatctccatgtacgacacgatgtacacgcagaacgcccagcaataccgcgagctgaaaatgaccgtactggccggcaagaaggcgctcgccgacttcaacgccaaccagctgccagcgctggaggccgaggccgccgccagtggcgacgccatgcaggcgcaagtgctgaagaacttcaagtccaagctcgaccgttttgccaagcgactcgacgacctcgaccgcatcagcgtggttaccttgcagaccgcgccgcagatcaaaatcatccagaacgcggaccagaccatcgtggacaagatcgacaccaccatctccaccacgattccggtgtggaagagtcagatggtgatcgcgctgggcctgtccaaccagcgcaaggttctcgacctgcagaacaaggccgacgatgtgaccaacaagctgctggcgcgtaacgcggccgccctgcacaagggtgcagtggacgcggaaaaggccaaccagcgttccgtggtggaaatcgacacgctggagaagatcaacgccgaactcgtcgccaccctgaaggagaccgtgcagatccagaaggaaggcaaggccaaccgcgaggccgcccaggtcaatatgcgccaaatcgagtccgacctcaaaaacgccttgctcgaaaacgcccagcagatgtgagccgttcgcgcgccagcatgctcccgttggcggagtttgcgggaacgtgcaaccatgctcccgttggcagaggtatatgagtacgcctactggtgtgcgtatatatgctcccgctggcgggagctggcagccgtaagactggctgagggtggtcacggcgctcggctcggccggctttaccggcagccattcccgccgcaatttctctgtgggcataatcccggaatgattgccgcgctcgggaattggatgaagtgaaggttaaaggttgagagcccgggagggttccggaaccggccacgataaccgctgctagccccgcgatacgggttggcggccggcagccaagccgattctctcctaatcaaggagtaccgattatggcaatgtttccggctttgatgaatgacacgatgttctcggatctgttcgatgatccgttctttgagggttggcgcaacacggacaacacgatgagtgccgtaatgcccgccaacatgatgaccaccgatgtgcgcgagaccgacaagggttacgacgtcgacatcgatatgcctggctttaagaaggaagatatcaaccttgagctcaacaacggctatctgaccgtgtccgcctcgcgttgcagcgagcatgaggacaaggctccggccgctgaggacgaggcttccgacagcaagtgtgcttgcgcgtccgattcgggcaagtggctgcgtcgcgaacgctacatgggctcctgctcgcgtagcttctacgttggcgaggacgtgaaggagtccgacatccacgccagctaccggaacggcacgctgtgcatccaggttccgaagatgcaggcccagccgcaagtcgagtccaagcaccaaatcgcgattgagggctgacgatacttgattcgtcccgaagtcccgcttcgagtagcttcgccccctctgacgagggggctcccgcgaagcgggtgggggagagataaatcgtaaccaaaccatgcttcccacgccgtctgccctacgctttcaacgccgactaacctgacagacggcgggaaacatagccaatgcaaatgccgggtagggatttaccctacccggcattttgctgtttcaatcaccgaaccccaccctgttcgcgcgccggtcgcgtgccgttctgccgctgtacacatccgatgggtagagtgacttcgaaacgatgcgagagaggcggacatatggcgaacggcgcacagaacgcaagcggcacaccggcaccggaggcaagccattccggcggccacgtcgtatccgcgcgcgccacgaccatcggcctgatggcaatcctgctgtggagcttcatggccggcaccgtgcgcatcgtctccgaaaacttcggcgccacgcttggctcggccctgatctacacggtcggcggcatcctgctgctgatgttccggcgcccggccccgattcgcgagttccccaagaaatacctgattatcggcggcctgttgttcgtattttacgaatcgtcgatatccctctcgctgggtctggcctctaccgacgcatcctcggtggaagtgagcctggtcaactatctgtggcccacgatgatggtgctgctgtcggcgggcgtatcccatcgcaagcacgcggtcgtcaaggtgctgccgggcgcgatcgtggccactgccggcgtggtgttggcggtcggcggtaattccgggctcgactggcatgcggccgtgcagcatatcgccgccaaccctttgccctatgcgctggcgttcgtgggcgcgctcgcttggtcggtgtacgcggtgttcacgccagccatgagtcatggggtggacggcacttcattgttcttcccctgcgtggccgtggcgttgtggattatccacttcgcgtccgggcaggggtggccggccgagccgccgagtctggtcgcatggctgtttgtgttgattgccgcggcggcgattggcggtggttatgcctgctggggctatggcattctgcatgggtctatggagcggctggctattgcgtcctatgccacgccggtgctgtccaccggggccagtgcggtgttgctgggtttagcgctgtcgctgccgttttggtgtggcgcgctgctggtggccgtcggatcggtgcttaattacttggtcagtgcgcgcaaataggggggtggctttgctcatggggcggtaataatcccatggggcggtaaaaccctcatggggcggtatcccaaaatggctttattctgccgtttcacaatttcttcaaaccgccccatgggccttttaccgccccatggataaattaccgcccgatgggcagcagcaacttactcgccgcgacgctcggacgggcggcgaatcgggtcaagcagcgtattcggatcggagatgccgaacatgctgcgcccgccggtggattcagggtgcttggcgagaacggccagcgaaatcgcccccggaatcataatgatcaccaaaagggccgccaatccccagttcacgaagaatccgagccccagtacgatggccaccacaaccaccaccgtgacgataatcgtcaacagtgctcgacgtgggttggtttccctggcccaagaggtgctggctgcgggttttgctgttgaactggccgcggcgtttgtggctgttgtgccatcagccgtgacggtcgtgggccttgccgccgcgctcgtcgcggggccagtaggggcgtcagacacgttatcggcggcattgccggtcgctgctggacgttgttcgtttgcgtgagtcatatccaccagcatattccctgcttccggctgaagctgggacaagcctgcgcgccgctaatccagcgccgacactggccttgaactgcgggcgtcagaccggatgtgaacaggcgctgaacggagtctggggaaaccatgagaactcgcgacaatttttgtgaaattgggtgacgctctatgaatcgcgcgctagtgttgcgtgagcttacaaggcgaggagcctggagcgcggggggtgaaggatgaagaactccgtttggaaaacgttcatggaattgtctctggtccgcggaatcgtgccgcggaccgtgttcggactgaccgcgatcgcggcaatcatactgattattggactggcgctgagcaagggcaagaagcgcggccgcctgcacccgctgattgtctcgctgattgccgccgtgctcgccggcgcggctggactgctggttgcatggctggtgtccgacgtgtttatggtgttcggcgtatcgctgggctggccggtgatcttcaccatcgcgggcggcatcgccggcgtcggcttcgtgatcgccgcagccgtgaccctgcgcggggtccgccgtgcgctggccgtcgtgctggtgccgctggtgctgctgtccaccgcgctcggcgtggactcgatttacggcgaataccagaccatcggcaccctcgtcggctacacgccgtacgcctcgctcggctcaatcgaggtacacaaggccgcgatgagtgtcagcgactggcatagcaaggcgcggaagggcagcctgccgtccatgcccagccaaggcaaggtgctcaccgtcgacattccgaacaccgaatccaacttcacggcccgcaaggcgatgatctacctgccgcccgccgcgctgtccgaccgtccgccggccttgccggtgatggagctgttggccgggcagcccggtagccccagtcgcctcatcgacgccggcaacatcgccgccacgatgaatgcgtacgccgccaaacatgacgggctcgcgccgatcgtgctcgtgcccgaccagaacggcgaggccacgcacaacagcctgtgcgccgacaccacgcaaggcaacgccgaaacctacctcaccacagacgtggtgaactgggccaagaagatgctgcccgtggccaaatcggcccgcatgtgggcgatgggcgggttctcgcaaggcggcacctgcaccacgcagctcgtcccgcgccaccccgacatctacggcgcgatgctgccggtggacggcgaactcaagccgaccaatggcagcgtcgccaagatggtccaggagtatttcgccggcgaccgcaaggcatacgacgaacaggtgccggtcaacgccatcgcctccaccggcacatctgagcaggcgctgttcaccggtgctggcgaacgggacaaggaatcgattagcaacatgcgcacgattgccgccgccgcgcgcaaagccggcatggaggtcatcgagctgatcgtgcccggcaccggccacgactggcacgcggtgcaggcggtctggcggcccggtctcgactggttcggcgaacggaccggcttgggcgagatgacgaaatcgttgaaggagtacccacaagtggaggtgttgcaatgagcgaagaattgcgtaagcacaacagtcatgcggcggaaagctggcgcgaactggccggcgacgtgcgacagtgggcggacggtcatcgactggccatcactgccacggtggcgctggtggtgctgaacttggtggtgtggctggtggtcgcgatggccggattcgcgttcccgctgcggctcgacaccagcatggccgaattcgatttcggcaaactcttctgtacgctgttcttggcgcgcggcgtcatccagctcattcttgatgccgtgctgtggctcgtcatgctgtcaatcgccgagccgtggcttggccgcgcacgtaccgtcggcaccgcgctcgcctgcgcgctcggcggcgtgatcgtgggcctgaccttgtgtgcggcggccggatggctgttccaggactcccaattcgtctcccgcatgcagttcgccttgagcccgctggtgttgccggtcggcgcgcttatggcggccagcgcgttctgcagccatctgttgcggcggcgtattcggctgatcggctacgtggcgattctggtcgcgctgctttacagcggcaatcctggcgattactgcattctcgccgccgcgctgatcggacacgcggccggccgcgtgatggccgggccgcccgcgcacgccgaaaccggatggcactggctgcgcagcacctccttcgaggcgcggcgcatgttcgcggccatcgccgtggtgctggcgctggggccggtcatcgccatcacctcgcataatcacgcggggccgctcagcacagtcggcctgctcatgagtccggtctccgtcgacgacggcacgctcgcgcgctgcctggccggtgccacgcacagcggctgcttcctgcaattcgacctattgcgagcctcgatgccgggcgcggtactgcgttcgctgctgcccaccgccgtgaccctggtgctggcgtggggcctgtatcgcggccgtcggttcgcggccatgtgtgccgtggccatcaacctgttcactgcgggagtagccatcgcctactacctgatcgtgccgctgagctttgcgccggacggcatgacctcactgctgcagcacggcgcgatcaccgcctgcgtggcgaacgccttgccgccgctgttctttgccgtcgccttgactgcggcgttgaagcatttcccgattcgcgtcggctggcggcgactgatcggcggcgtcggcgccatcgtgctggttctgctggcgtgcgccgccgtgtacctgatgtacggcatcgcccagccggacgccttctcgccgcgcgccacggcctcgtcgctgttggccgaactgccggggcgcttcctgcccatcggcttcctgagccatatgaagttgtcgttcgtgccgcgtaccccgatggcctcgatcgtgtatcagggcgtcggcctggtgttctggatcgtggtgctggtcgtggtgatccgctggatgagcgacgtgagcgaatcgaacgagcgggcgcaggcacgcgccgagcggctggtcgaaaccggcggcgaatcgatgagcttcatgactacgtgggaaggcaacagctactggctctcgcccacgggcaaatcggccgtggcatatcgcgtgctcaacggcatcgccttgacctgcaccgggccgttcggcgagccctccgagtggatggacgacctgaccggcttcacccagtattgcgtggagcggtcgctttcgccggtgttctacagcgtgcatcgcgaacagcgcgacgcgttgctggaggccggctggagctccatcgaggtcggcagcgaaatggtcgtggacccgcgcggctggaagacgaccggcaagaaatggcaggatgtgcgcaccgccatcaacaaggccaagcgcgacggcgtgaccgatgtgcagtccacgttcctggaagcgtcgctcgatgtgcgcgagcagatcgaggacatctccgaggagtgggcgcagctcaaggcgctgccggaaatgaagttcacgctcggcggtgtcgaggaactgcgcgacccgcgcgtgcggctgctttacgccatcgacgcggacgggcgcgtgctgggcgtcaccagctggctgcccacctggcgcgacgggcgcatcgtcggctggacgctggacttcatgcgccatcgcaccgacagtcccaacggcattatggagttcctgatcgcgcgcatggccgagcgcctgcgcgacgaggggcttgcggatcctgagcatgccgtggagttcatgagcctgtccgcggcacccttggccggcatgaaccccgagcgagacaatgcccgggaaggtggggtggcggccggcgaaggcacgcaggtgctccaacacgcgctgcagatcgtggccgactggatggaacccgcctacggcttccactcgctgttcaacttcaagcgcaagttccagcccgccgaagcgccggtctacgtgtgctacccggacccggcggcgttgccgcagatcgggctcgcggtggtgcgcgcctacgtgcccagcgtgacgcccgccgaagtggccggtatgctcagtacgctgcggtcgtagggtgcggggcggaccctgacaattgtgctcgcggttgaggctctaggccgtttgcctgttcgttcacgtacggacacggagattgaccgattcgagcccaagatggggctatctgctttcaggaggtacatttggcctcttgcggacagctaactgccttcaaagagatacctaaactctgaaatcccgagtatgagcgttgcaatgacggcgtttgtactcggggtttcccgtattcagtacctctttgaacggagaaagcattctgcagaagcccgaatgtacctctttgagcggcgaaagcccagcgagaagggcgcagaaggcgctatctccgtttcgaggggctgatttggcctctccgggaggtctactcccgcttcgaggggctgatggccgagtattcacgctccaaaatcggcggaatggcgttgacgcggatgggcttttacatgcggtctagctgccgaccagccccttgaaacgggagtagacctcctgcgaaggccgaatcagcccctcgaaagcggttttgccggtgcagaggtgtcgttgactgcatcgcgagccgcctcgacgtagtaacgtggggcgcatgagcgaacgtaacgaacacaatgacggaaatacgcaaaccgcatacttcgccggcggctgcttctggggactggagcgctacttccagaacgtcgacggcgtcacggacaccacggtcggctacgcgcaatccaccgtcgaatcgccgacctacgagcaggtatgcgcgggcggcacggatgcggccgaaaccgtgaaagtcgagtttaacccggcacaggtcagcctgcggacgctgacattactgttcctggaggtcattgacccgttctccgtggaccagcagggcgaagaccgcggccggcagtaccgcactggcatgttctacacggacgagacgcagcgcgccgtgtatgtggcggccttggagcagctggtcgaccgccagccgcagcgcccggccgtactggtcgaaccgctgcgcaacttctacccggccgaggcacatcatcaggactatctggtgaacaatcccggcggctactgccatgtgccgatcgccgcaatcgcgaacgtaaaacgccgtcagaagtacgtggaacgcatctgggatctgacgcttgagcagttcgcggtcacacagaacgccgctaccgagcgcccgttcgtcaacgagtatgacgaggagtttgagcccggcatttacgtggacatcgtcagcggcgagccgctgttctcgtcgcgagacaagttcgattccggctgcggctggcccgcgttctctcgcccgattgccggtgacttgctgaccgagcatgaggaccaccgcattccgggccgcgaccgcatcgaagtgcgcacgtcggacacacagattcacttgggccacgtgttcaccgacggcccggccgaccgcggcggcctgcgctactgcatgaattccgccgccctgcgcttcgtgccgcgctcgcgcatggccgaggaaggatacggcgactggatttcggttgtggatggggatgagcaggcatgagcatggagaatattgcgggcgctcgcaagcccgccaagcgtgaggatgagcacacggtcgccggcgagcatcgcataattcgccgtgccgcgtgggagcgctgtggcggctacgacgagtcgatgcgcggcgacgccaccgccagtcaagccttcatggcccaccccacctacggcgacggcggaatggccgccgccgtacggttgaggagctgatggtcagccggctaaatgccgatagagctctggatcgattggccgggccaaacgcaggaccgacagggtgaccttcacactgccctgtccggttgcgtcaggcttggtggtgagctgaggattctcaaacgcagcgacgtggccaacgtagtagtacttgccatcggcctcttccgccttgcgcatgacgaatagcgggacgaaatgtgtgtggtcccaattcgggccaatgccgctaagcgcccatcggaattccggagactgcggagtgcgtccgttcttgctgaagtatttcatttcctgtgtgctcaggaattcatcctcgtattggctggccgcgtatttcacgaagatgggcatggtgttggtttccttgtcgagcaggtaaccacccacgttttgcggagtgttttccttcttccatccgcacaggcgcatgacgtcagccatggaatatttgcgctcgtacaagaacatgtggtcgaagacctgttgcctggcggcggcctcgcggaacatatctcggcaattggccataccggtgcgcaaagtgtccgcgaagaagatgcggaacgttcggttcgtggcaagtatgtcggcgaatctgctgctcaaccgatatgcggtgtcgcttcctgtgccggtgctgttcaaggtttcgaccaatggctggttgccaaaacgattgcagttcgggccggtgaaatatgaataatcgagcacgctgatcgcagagtcgaattgcgcgtctgaaccatcggccagcgggaattcagtacgaatcgcatcgagcagttcgctgcggccgattgacgagcccgcactccaatgctgaggtacgtcgtcgtcgagccgttcgctgacgaaatggcatagctgagcaagaatgaccaattcgtgcggtcgcaatccgggcagcagcagctccgctgccatcttgagtatcgcgtcttcaacgtcggtcaccggctccaactgatcctcaaatgtcgcttcatgatgtttgcctttgcccaggcttttttcacgggaacgcacgaaatcaagatagttgctgcgcttcgatgcgatggtatacggcagtgaggggtcgtagttatagatgtccgtaagcatggggatgcggcccagctcgtaacggacttggcgatactgttcggacagctttttcatgtcggaccagtcggcggtgtccaaagacttaaggatgcgctccttggcgatcgggtcgaaactgatggacgacaggccgattgactttcgctgcaggttcttgcgagccctgtcgcggtcgccagtgttgccgtataacgccaccggaatcagatagttgttgttgtaattgccgatgaaatcgataaccacaacgctttctttgtgagggaatttgcgcagtccgcgcccgagctgctgcgtgaagataatgctggattcggtgctgcgcaacatgacgatttggttgacggcgggaatatcgactccctcattgaacatatcgacagtgaagagatagtcgagttcgccttcagtgagcttgcggacgtattcgtctcgctgcgcttgggacacgggcctgccgtcatcgtccgtgctggtaacggcagcggtgcgataggggcgttcatcttgttgattccactgctggttaaacagctgggacagcttatgggcttcctcctgtcggctgcagaacacgagtccggtgaccggaatgttgaactgcccatattcctgcaacttgtcaatgatgtagcggactcgcttttcggtggcaagctgctcgatctcgtacttgagctgtttcgagtccttcgcatcaagacccttggagacatcgagacgatgggcgattccattcggatcgtcgtcggagccaaggtattccgcaacgccgtagtagtggaatggacagagcatgttctcgtccaacgccttttgcaagcgaatttcgtacgcgatgttatgcccgaatagctcgaagatgttgatgccgtcggtgcgctctggcgtggcggtcatgccgagcatgaagtcggcatctttgaaatgattgatgacgcgctgatatccttcggctccagcgtgatgaacttcgtcaaccagaacgtagtcgaattcatcggatttgaattgcgccaaaacctccggctgccgcatcgtctgtaccgtggcgaatacgtagcggcggtcctgttgcttgctggtgcctgaatacaatcccaattcggattcatcacagccgagcaccttttggcaagagttcattgcggtttgaagaatcatctgctgttgggcgatgtacagcatgcgcttcggctggcattcgcgtacgtcgaatgcggaaaggtacgtctttccggtgccggtggccgacacgataattgcgcggtgctcgccttgttcacgaagtttcttgagattcgccaacgcctcctgttgcatggcgtttggctgaatgtcatgcccctcaaacgactgcagaatctcatgacgcggtggggcgtatttcttgaaatcttcctcatactgtttgatccactcttcggtcagcggaacggaatcggccacctgtgagtcgatttcatcctggaactgcccgaccagctctccatccgccagcgatgagactttgagattccattcgcgttgcgtggtcaatgcggctccagtgagattggaactgccaacgtacaggtcgtaatagggcgtaccgtctttcatgcggcgagaaaagatatatccctttggatggaatggctgtccttgagccattgcggccactgaggcattgcgggagccttcccacacgcgaacgtcaacaccagtggtgttctgaagatgcagcagctcccagaatgccctgggatcgttgaaatgatttttcgttgaggtaatcagtgtgcccgctcgggtcgctgtttcatggtgacttctgaagtcttcaaataagctgagcacggcctcagccgagacgaatgcgacagaaatgtcgaaggaatcgctagtagccaaggaattgccgatttcctcgcgcatggtcaatccaccggggcgatttgcgatgagggtcggcttatattcgccgggagcatctgagcgcggctcgatcagacctgagatgacatcttcgaggattgagggtgtcgggccaggatcactatgttgcgtgttggccggagagcttgaggtgctggccagattgatagacatgttgtcttgttcccttgcgattcgaattgtttgttgatgactgcatgactgcatggctgcgctatggcgcattcatcggagcgtcagctgtttgctggcgataatcgcgactgcttcgcgatctaccggagcccagttcaatgtcggcatatcggcaggattcagccatcggatatcagtatgctcggtgagatgcggtgtgccggcgatgaggtgacagacgaatgtagtgagccgtacggtcccaaagtcgtaggcgtattcgctggtgcacacttcttccgcgacttcaacttcgcataacagctcttcttcgatttcgcggtgtaaagcctgccgcgctgtttcatgaggttcgattttgccgccggggaattcccagtatccggccaacgacttccccggaccgcgttgtgcacatagtacggtgccgttggtgacgattgcggctcccacgacgttaatgattttgcgttccggatccatgaacaaccaggatacaacgcttcaagatccacaagcgatccacgatcctcgacagtttcgcaagaacgatcctgattcaatcggaactactggaatcgcagtgttctagggcatttgtggaacgaaaagaaaggctgatcaatggtgaatgaacggcagaccgatacgtgtgcggacgtgatgtacaggcgtgaacggcagagaggctgtggcgaagcagggctggacttcgcccctttcattccctcacaggatgaagttgatcagcagatgagcgcattggatgacaagcttgtgtccaaggctcaggaacaatacgcgaaccgagaaatctatcctttggacgagtgctatcagttggacgggtcgacgtttatctcagccgaggcgtttgaagagattcttggcgacgagcaaacgcattatatggcttggaaaaacggctgtattgataagctgtccattgattattgggagatgccggatgtgatggcctatcttgtggagcgcagcattgcggaaggtgacggcggtgaatgctgttatacggatgctcagccgattgattatgcggaagattgtgcgtactcgcccagcgagatgttggagtgcttaggcgccaattggcaagagcagggtgttgccgatgatggtttgagttacgcgttgtacgggcacccgaatatcaatgtcgagaacgtgtccggttcgatgatggtcgtatcgacggagcagcctgggctttcggtgatggttgattatcgcagcggaatttgggtggtccagccgtttgcccatgacgagtcatttgggtctgcgattcagtttggtgagcggcttgcgcccgttgaggctggccttttgcggcccaatgtctatcagcattttttggaggcgaaacatgcgtttgattacgcaatcgcgtggattgaagatgttggggaaggcgctctcgactattgtggtagccaagagaagcgatccgtttccgaggtgagattcgggagcgatccgactctcggcagtgattcatctacgcagacaagccaaaggagcctcgccatgattctcgtcaccaccaccccgtccgtcgacggatacaccatcaccaattaccagggcatcgtcttcggcgaagtggtatccggtgtgaacatgttcaaggatcttggcgcgggcctgcgtaacatgttcggcggccgcagccagggctatgaggaagagctgatgcgtgcccgcaacgaggccatcgccgagatgcagcagcgtgcggaggcgatgggcgcgcacgccgtggtcggcgtggacatcgactacgaggtgctcggcgccgacaacggcatgctgatggtcaccgcgtccggcaccgccgtgcagatcgcgcgtacggcctgagcctatcgaacgcaggccgagcttgggcccgagctcgtccaccgagccgggctttgtcggttatcgtgacgcattacactgacgctcatgaccatacgaatcgaagcatacgaccggctgcccgccgccgcccgcgccatacgcgagcaggtgttcatccgcgaacgcgactggcggccggagttcgatgaatgggatgccgcgtccgtacatctgctggtgttcgattcggataatgatgcgcccaatcgccctggctcgtccgcgcaattggcctcacgcagccagcccattcagcccagccagaatcaccccgtagcgacctgtcggttctacgcggaccccgatcatcccgaccagcccgggcgatacatcatcgcgcgcctggcggtactgcccgaggcacaaggccggcatatcggctcgcggctgctggctgacgccgaacgccgcatcgcgcaagccggcggaaccatgaccgccgtgcactcggaaaacgaccactacaagttctatgagcagtgcggctatcgactcaccgatgaagtctatgaaggcggccgtcacggctggctgatcaaggacttgattcttggctccgagaattaagggccgctgtctgtcccgcgccgtgttcaaatcgctgcaatacagcgagttcgaagcatcctgtatgaattgctggacgactacagcgcacagacaatcagataaatcgccacgacgtggcaggcatacccgatgaccgtgcccaagtgaaacacctcgtgaaactcgaaccagccggggacggggttcggcttgcgcagcgcgaagcatacagcgccggcgatgtacgcggcgcctccgcacgcgatgagcacggtcggcgccgggcctactgcgggagccgtccagagctgcggaataagcgttaccggggccagtcccagcacgacgtagacggtggtgaacacccagttcggcgtccgcagccagacgatatgcagtatcgtgccgatcgccgcggtcgcccagatcaccgtcagatatggccggcgaatcgccgggctgagcgtgaacagcacgggtgtgttggtgccggcgatgatgaggaagatgttcgaataatcgatgccgcacagcacgcgagtcaccttcgcgctgcgccacggcacgacgtgcagcagcgcgctgttgccgaacagcagcatggccgaggcgccgtacaccgcgcacgccgctttgacgggccctgccggcgcgatacagatcagtacgatggacgccgcgatgcacagcggcagggtggcgaggtgcagccatccgcgcaggcgcggcttgcgattgccgaatgcgtccacggggacgatctggcgcttgatcgccttcagtgcggccttggcttggcggtagcgcgattgcgcggccctgtatcgggccgatgcacggtccagtgcggtggggttggcgtttgcgctggatttttgactcgcggttgcggaaggcgcaactgttgcggcggaagccatggttcgtccagatggcgtgctgatggaaacgctcatactgatcacctcgctatggccggcgacgctctcccgaccactaacctacgctaccgtaacctagtataggcccgcgcaataatcaaggttgatttcgtaatgcttacagttcttccgtggtgcggtattcggtggtgcggttgcggaatacatcgccgagtctgtgaactcgtattatgcgtgtctgctgggtccgacttgtgtcggttcctgatttcggattgctgcgaatgatgctcccgacgccgccccgccagttgccggattcgtacggctcggccgttcggccgagctggtcgtcggtgactccagatacttcgttggtttcgtctcggttcatgatgttatgtaatgctagtttatggcggatggaaagttgaggaaagttaaatctgcttcatgggcttctctctgatctgtatttgtcccggttcatatgtcaatcgtttgacctgtcgaccggggcagaatccgctgtcccggtcggcgatttcggcttgttttcgtgaaccgggacactccggtttcctcaactcatatcgtctggcagacggaatcggcggaataaggccgattctggaattggcacgttgtcccggttttcgcataaatcgattgacatttataccggggcaacaaaaattgtcccggtttgcaaagatcgcccgaaatcgcgaaccgggacagcggattctggcctggcttgaacgtcaaacgattgatgcaggtaccgggacattttccgccacgaaagttgggccataagtctcaagtcctaaagcccccctgaaaaacggcgcgtgcccggacaaagcaaaagggctggaaccttccgattccagccctttagttgctggtgcgagtggggggagttgaacccccacgagcatacactcactgccacctgaagacagcgcgtctaccattccgccacactcgcaaacaatcgactaacttacacccggctgggtaatcatgcaatcttcggcgtgtcgcatgtgcggcagggatatatcgctcgtgggtcttctgcgggtgccgtgatctttgacggtggcgacactcccctcagtcacttcgtggcagcacaagccgcaacgaaggagaaaaactcacaaccctggccggcgctcgccgttgccgtagaagtgggccaacgcttcgtcgcggaactcatcaaagtatccgccgtcgatcgaggcgcggatgtcgtctagcagcttcacgaagaaatgctcgttatggatcgtggccaacgtaaacccgttgaactcgcgggcgcgcagcaggtggtcgacgtacgcgcgcgaataatgctggcatgtgtagcagtcgcatccctcctccagcggcccgaaatcgaacttatgctgggcgcgcttgatgttgtaccggccggcgcgcgtgtagatcgcgccgttgcgggcgcagcgcgcgggggccacgcagtcgaaggtgtcgccgccgttctccacgcacgcaaaaatatcgtccacggaggcgatgcccagcacatggcgcgggcggttctccggcatcgcgtcgcagatccaggcgcaagtgtcgccgatgatgcgtttctcgatcgcgccgccaatgcccacgccgtcgaagtccagcgacgcgatctgcgaagccgcgcgccggcgcagatcctcgtaattcgcgccctgcaccacgccatacagcgcctgatacggcctgcccaggcgttccgccgtcagccgctggtgctcgtccacgcatcggcgggcccagcggaaggtgcgctccaccgagtcctcctggtaggagcgggtgttcatcagcgtggtgagttcgtcgaacgcgaacatgatgtctgcgccgattttgtgctggatgcccatcgaaatctcagcggagaaacgatgtgcgtcaccattcaaaggcgacttgaacgtcacgccgtcctcatccacccaggccatgcgttccttgcccttggcgatgatgtcgtccgacttcatgccggtcacgtccattgccagcgtcttcttgaagccgacgcccagcgacatcacttggaaaccgccagaatcggtgaacgtgggcccatcccagttcatgaaacgcgccaagccgccggccgcgtccagcacgtcctcgcccgggcgctcgaacaggtggaaggcgttggccagcaggcactgtgcgcctagatccttcatctgctcgggcaacacggccttcatcgcggcttgcgtgcccaccggcacgaaggcaggcgtgcgaatatcgccgtggggcgtgtgaatgatgccggtgcggccgtatcgggcaccgtctcgcccaagcccgctggccgtggatggcaggcgggtgatcgtttcgaaatggaaggcgctgcggtcgccgggctgtccgggctgtgcgcccaacggatgttcaagaaggctgatcgtcatatgttcactttaggcagaagggccagaaaagggccggaaattgtgaagaactcggtttcgaggggcggatttcgccgctcccgaacgtctacttccgcttcaaggggctcccggtcaagtaggccggctgcaaaaatggcggaatggcgttaaatgagggcccttgatactcggaattgaccgcgcgaacagccccttgaagtgcaagtagatgttcccgaaacaggaaatcagcccctcgaagccgagatgcccataagactctgcgatgattacgcatagactttcaatcaacgttcagaaaacctccagattgactgcctttactactgaggtagcacacgagaagtggcaatgggcaagtgcccgaatagccgccgaacagacgtgataggaatttaggaaaaggagcagcaatggctgacgaatttaacccgcagggcgtcgaccagaccccgcggaataacgaaaaccccaatagtactgccgataccggcaacgccgagccgaagaacccgtttgtgggtggcgactcggttgatgccggcaacgccagcgattccagcgagcagcaagccccggtttcctcggccgccctcgctgccgatcagcggcctacgcaagccgttaccgacaccgccgccaccgagcccatcccggactacgcctccgccaagggcgagagcacggtggtctcctcctcgccggcttctccggcagcgccggccgcagaccagacctcggccacaactccgctgtaccgcccggccccggaatacggcgcttatgggccgaccccgactcaggcacagggccagcagggcggccaggccggcagcaatgcccagcccacgcagcaattcccgttcggtcagcctgcacagcaaaccccacagggccagcagggcaaccgcaatccctactacaccaataacccgcagccgcagggcaacggcaatccgttcaatccgcccacgcagccgcagcagaacaacggcaacccgtttgccagccagtccggtcagaatggccggaatggccagcagccccagcagggcggtctgttcggtttcggcactcccggtaccggtacgccgaacggtcaaggtccgacccagccgggacagcccggtcagcccggccccgccaagcagggcatgtccaagacggcgagcaacatcctcatcgccgtggtcgccgccgttctggctgcggccctctgcctgggcctcggttacggcgccctcaccagcggcctgatcaccttgccgaccagcaattcgctgtccaacgtcagctcgaataagtccggctccgggtccgccaccgccaagagcggcgaagcccccgactggcagaccgtcgccagcgatgtctccggctccgtggtctccatccagaccgcgttgagcaacggcaccgccaagggctccggcgccatcatcgacaccgaaggccacatcatcaccaacaaccacgtgatctccggcgcccagcagattcaggtgacgcttgccaacggcaacatgtattccgccacgctcgtcggcaccgacaccaccaccgatcttgcggtcatcaagctcgacaacccgccgagcgacctcaaggccgtgaaattcgccgattccgacaagctcgccgtcggcgagaacgtgatggccatcggcaacccgctcggctacgacgacaccgccaccaccggcatcgtctccgccctgaaccgcccggtgaccgtgaccgacgataacaacaacgagatcgtcaccaacgccgtccagatcgacgcggccatcaaccccggcaactccggcggcccgaccttcaacgcggccggccaggtgatcggcatcaactcctcgattgcctctaccgcaacttcctccgactccgccggctcgatcggcatcggcttcgccatcccgtccaacctcgtcaagcgtgtggccgacgaaatcatcaaggacggcaaggtcaagcacgttgccctcggcgtggtcatcaagtccgacacggttgaagccgacggcgtgacccgcggcggcgcgaccatcaccaagtccagcgccactggcagcgcggtcgtctccggcggcccggccgacaaggccggcctcaaggagggcgacaccatcgtggccttcaacggcaacgcggtgaacaacaactactcgctgcttggttacgttcgtgccgcggctttgggagacaaggtgacgctgaccatcgtgcgcgacggcaagaccatggatgtggacgtgacgctcgatcaggaggagtcgtcggtgaacggttcgtccagctccgattccaacggcaacagccagaataagcagaacaaccagaatggcaatggccagaacggttacggtaacggtaacggcaatggcaacagcgatggcggcaccggtgacggcggcggcttctccgacccattcggcctgtggtaaagccgactcgacaacgtcacacggtgttgagcggtaaccgctgaacaccgtgtcagacaagcaaaggcccgtggcagtgagcaaactcctgccacgggcctttcgtatgcgcgattgtgccccgcgcccatgccgccaacgtagtttcgatatccggcatgtcgcgcaacgctcgttgatagggtaggccaagcactgagttcgggcgacgtcccgaacacagcgcataattcaatacaaaactgaatacatttctttacgccgtgtatcggaaggttgcgcgggagccgagcaaagcgaagccccaggcaaagccgccggtgggttaacaaggcgtgaccgtagcgccgattgcgcgggccacgcttaccgtaccgcaatcgactccgtatacgagcgtaaggagcaatgatgagcagactcatcagattcttcaccaaaattctcgacatctgcaagcttgtgccgatgcttccggtcgtcgtcatcgccgcaattccgttggctttactaggcgattggcgtccgtggggcaatgcgatggcgattccggtactcggcaatccgggcttcggccagtggctggttatcgcactggtgctgattatcgtgattgacactgtgcgcggcatgattgacgatttgcgtcatgggcaggttggagtcgatgtgctggccgtggtcgcgatcctctccaccgtggccgtcgccgaatactgggcaagttgggcggtgacgctgatgattacgtccggcgaggccattgaggaatacgcccaagccaaggccgagcgcagtctgaccgcgcttatggaagccgcgccgcagaccgcgcacgtcgtcaacctgcctggtgtggggtgtgggtttgctgccgataagggcgattcgtccgatggcttccggcgtgtgggcttggcgtcggctgcggccgccgcgcaccgcttcgacacggtgccggtcgagcaggtgcagctgggcgatgtactcatggtgctgccgggcgaaactgtgccggttgacggtgagctgctgtccggcacggccacgctcgacctgagcaatatcaacggtgagccggtgccgcgtgaagtgttcgccggcgcccgcgtgatgtccggcgcggtgaacggctcgactgcattgaccatgcgtgccacccaggtggccgccgattcgcagtaccagcgcatcctcgagctcgtggcctccgcgcaggagtcgcggccagccgtggtgaaaaccgccgaccgcttggctgtgccctttaccgtgctctcgctggtgattgccggcatcgcatgggcgatgtccggggtgccgacgcgattcgcccaggtgctggtgctggccacgccctgcccgctgctcatcgccgcaccggtggcgtacatcgccggaaccggacgcctcgccgcagccggcgtgcttatcaaagcgcaggacgtgctggaaaaccttggccgcgtcacgcaggtgttcttcgacaagaccggtacgctcaccgtcaagcagccgcaggtcgtgcgcgtcgagatgctgcccggtgccgcaacccgtctcaacgaagaccatgtgctgatgatggccggcgtggtggaaagctactcggtgcacatcctgtccaaaggcatcgccaaggccggaacggaggcgatggcccgattgcgccagcggttcgaggatggtcagcggctctgccccgagccggaggccagctggcccggccatggacgggagtatccggtcatcaagaatatcaatgaagatgccggcaaaggcgtttccggcgaggtgaacggacatgcggtgcgcgttggccggctgtctttcgcggccgccggggaggaaggattcttggcggtcgatcggaccgcccccagtcggtctgaggatgacctgcgcacacgatttgggctgcttcagccggacgaaatggcgtcgtatgtgtctgttgatggtcagctgatcgcgcgcatcgtgctgcgcgatgtgccgcgcgccaacgccaaggcagcgctcgccaaactgcatgagttgggcgtcaccgagctcgccatgcttaccggtgacaagcgggcttccgccaatatcattgccagcgaagtcggcattgacgaggttcacgccgaactgttcccggaggataaggtagccgcagtcagggccgctacaggagccggcaaaaccgtcacgatgatggttggtgacggtgtgaatgatgccccggtgctcgctgttgccgatatcggcgtggccatgaccgatggcacgtccaccgccgcttccgaaagcgctcaggtggtcattatgaatgacaatatcgccgccgtgccgcgcgccatcgccattgcacgccgcaccaagcgcgtgatgcttcaagccgtaatcgcgggccttgtgcttgccaccatcggcatgattgccgccgcgttcaaccttatcccggtcgtcgtcggtgccttcctccaggaggccatcgacgtggtgagcatcctctgggccctcactgccctaattgatcgggactgattaagaatatgaggcttctgctgtttttgtaggtcagttgactgaccgggatggtcgtatgtcgagtccaccgcatcgaaacataatcggggcgatacggttggtgacgtggcggaaacggaaatcccacccacgaaagcagcaatagcatcggagttattcattaggtcgatttgacgtttattaggtcggtccttggtcggagcggcccttgaaaccccgccgttccaagggatggcttcagcaccctccgacctaatggacgaagaaatgacctaatgaatgcaatcgaggtcgtaaagagccgttggaggtgacgtctttaatgcctcaagggattcactgattgcacagaattcctactgctctgcggcggctctttaccgtcggccttctagccaatcgaggggtggaggtgacgcggattccttgtgagacataactatgctcaacccgactggttacgtactgttgctcacacggtataccgagaacattgccaattaaagtgagatggcgggcgaaccggtcatgataggtttgtccggatttgatttctatgagcatacggttgttaggatcggtgaaatccaacaaatccacctcgaccttgctggcatcgcggtagaagaataattgtggctcctgattggcgttcaaatgctgtttcatggtttccgcaatgatgaggttttcaaatatatcgccgaacttgggatgcgcaaccagtgcttcgaccgtccgaatgcccaagagatgacacagcaagccagtgtcataaaaatagagtttcggcgttttgaccacctgtttgcgtgcgttcgtgtagaacggcatgagatggaatgcgatgtaacttgattccagaatcgacatccatgcctttacggttcgcggacttacaccaagttcattggcgatgttggtgtagtttatgagtgctccggaactgagtgcgcaaagagtcaagaatcggcggaattcagccaaattgcgtacatcaagatattcggaaacatcacgttcgatataagtgtcgatgtagttcgagaagaacagattgagcggcattctcgtgtcataaatgcgtggataaccgccttgcagcataaacgtatccggagtaagggcctgatccgccttgcatgcttcttggaatgagaacggcaataacttgaccaatagggaaacccataatctgacattagcagtgctcgtaggtttcccaaacgcacaaactatggcctaatacacagaattcccaccaccctccctctgttgcaacggaaggctttgcgttaggctagagcgcgtgactgaatctgtgaatactgaactccgcattgctgtaatcggcgctggcccggccggcgtctactcatccgatatcttcctgcgccagctcaagaagctgggcgaagaacttggcctcggcaccgaagcgcgcatcgacctgttcgagaagctgccggtgccgttcggcctggtgcgttacggtgtggccccggaccacccgtccatcaagttcatcgcctccgcgcttgagaagacgctcgacaacccgaacatccacctctactgcgacgtggaattcggcaaggacgtgactcttgacgacctgttggcccgttacgacgccgtgctgttcgccaccggcgcggtcaaggacaagccgctgaacctgcccggtgccgaccttgaaggcgtgtacggcgccgccaagttcgtcgaatggtatgacggctaccccaccggtgcccgcgaatggccgcttacggccgagaacgtcgccgtaatcggcggcggcaacgtggccatggacgtggcccgcgaactcatgcgcaacgccgacgacctcaaggtcaagaccgacattccggacaacgtgtacgagggcatcggccagaacaaggccaaggtgctccacctgttcatccgccgtggcgtggcccaggccaagttcagcgtgcaggaactgcgcgagatggagaagctgcccggcgtgcagctcatcatcaacgaggacgacttcgatctggacgacgagaccatcgaggtggccggcaaggacaagctcacccgccagatggtcgaggagctgttcgccatccgcgagatggccgaagacatggaagacgacggcgacgtcgacttcgaaggcaacccggccgaccgaaagtactacgtgcacttcaactccgcccccaccgagattctcggcgaggacggcaaggtcaaggccatccgcgtggagcgcaccgaaaccggtgccgacggcaagatgcaccgcaccggcgagttcaccgactacccggttgaggccgtctaccacgccatcggttacaagcccgccgaagcccccggcattgcctacgacgagcacggcgcccacctggccaacgccaacggcgacggccgcatcaccaccgaggccgacggcggcgaagtgcgcgaccgcctgtacgccaccggttgggccaagcgcggcccggtgggcctgatcggctccaccaagtccgatgcgctcgccatcgtgaccaacatgctcgaggatctggccaaggccgctgaaggtggccgtgtggcagccgaccgcgaccccgaatccatcgaccgactgctggccgagcgcggcattcgcccgatcgacttcgccggctggaagaaggtcgacgctttcgagcgcgccgagggtgccaaggaaggccgcgagcacaagaaggtcatcgagcccgaccagatgcgcgagctcgcccacgcctgacggcccgcccacgcccgtccggcattcgtccggcattcgtccggcattcgtccacccggccgcgccccgtgcggacgcggccgggctcggggccggacgggccgggcgaatatgggacatttctcgcggcgcatatccagcaatcattcagcctgcgattttagtgtgtgcattatggatgccaaagtacgggtgcacggccatttcaacggcctgaagacaacgctgctgtttgccttgatgtgggccatcatcatgctgatttggtgggccacgggcggcagtcggcaaaccctgagcatctatatcgtcatcggcctgattaccacgttcggcacctactggttctccgacaaactcgccatcgcctccatgggtgcgcgggaagtcagcgaacaggaagccccggaaatctaccagatcgtgcgtgaactgagcgccaaggccggcaagccgatgccgcgcatctacatcgcccccaccatgagcccgaacgccttcgccaccggacgcaacgaacggcacgcggctgtctgctgcacccaaggcatcctgcagattctcaacgcccgtgaactgcgtggtgtgctgggccacgaacttatgcacgtgtacaaccacgacatcctgacttccgccatcgcctctgccatggccactgtcatctcctatctgggctattcgctgatgtatttcggtggcggctcgcgagacgaccgagatagttccggtggcctcggcctaatcggcgcattgctgagcgtgattctcgcgccgattgccgcgtctttgatccagatggccatctcccgtacccgcgaatacgacgccgatgaagacggcagcttgctcaccggcgatcccgaggccctggcttccgcgctgaacaagatttcctacggcgcgcaggccgcgccgatgcgcaaaaccgccggcacccagtccgtctccgcgatgatgatcgccaacccgttctccgcggtcggtttctcgcgcttgttctccacacacccgccgaccgatgagcgcatagcacgtctcatgcagatggccaacgaaatgaacggcacgccgatcgctccgcccacctactccacgcgcgtcggcaggtgacgtgctaggataactattcgtgcctcgtttggctgagcatgctcgtcacgtgaggtgcagcagccgtaaggcatgcggacatagttcatcggtagaatgaaagcttcccaagctttagaggcgggttcgactcccgttgtccgctccattgattttcaatgattttcattatttccgggaaagtgtcgcgcacgatcgcaaaactacgctctatttgagcgctttgcccgcggaacccagctgccggcaagcctcgaccacgcgggcggacatggaatcctcagccttacggccccaagaacgcggatcgtagaacttcttctcgcccacttcgccgtcgatcttcagcaccttgtcgtagttctcgaacacgtggtcggcgattggacgggtgaaggcgtactgggtatcggtgtcgatgttcatcttgatcacgccgtagcttacagcttcggcgatttcttccgggcgtgaaccggagccgccgtggaacaccagctcaaacggcttgccgttggggaaatcgactatgccggccgcgctaggcaactcgccttcggccaccgcgcgcgccacacgcgcctgaatgtcgccgagtagcgacggacgcagcttgaccacgccgggcttgtaggcaccatgcacattgccgaatgtgaaagcggccatgtaccggccacgttcgcccaaacccagtcggcgggcgacttcgaggccatcttccggagtggaatacagcttttcattgatttcggcggagtgaccgtcttcctcaccgccgaccgcgccgatttcgatttcgagcacggtgtgcgccttctgcgacttgtcgagcagttcctcggcgatgtccagattttccttgagcggcacggtggagccatcccacatatgcgactggaatgtaggctcctggcctcgtgccacctgatcggcctcatgcgcgagcagaggacgcacccactcatccagatactgcttggcgcagtgatcggtgtgcagagcgatggtgatgttcgggtatttcgcagccacttcatgtgcgaaagccgccagcgccagcgagccggtaacgcgatcgttgacccccctgccggagacgtaggccgcgcctcccacggaaatctggatgatgccgtcggactcggcgtctgcgaagcccttcaacgcagcattcagtgtctgtgagctggttacgttgatggctggataggcgtaaccgcctcggcgggcggcctcgagcatttcggcatagcgttccggtgttgcgatcgtcatggcttcattatcgcgcgaggcatgccctctaggctccgttcttcaacctgtgcgctgtgcgattggtcacagcatcgcctcgtacgagtagaaattcgtcacccattccgggttgtcgcacctccagcctcgccctgcgtgagacgaaacttcgcagggtagagggtgtacggtagtctgtttccggcggaatcgtgcgaatgcggaggtgcatcatgcctggaattgttcttattggtgctcagtggggcgacgagggtaaaggcaaggctaccgatttgatcggcaccaaggtcgattacgtcgcgcgcttcaacggcggcaacaacgcgggccatagcgtggtggtcggcgatgagtcgtacgccctgcacctgctgccttccggtattatcaacccgaacctgaccccggtgatcggcaacggcgtggtcgtggacccggaagtgctcttcgaggagattgacggcctggaatcccgcggcatcgattgctcccacctcaaggtgagcgaggccgcacacatcatcgcgccctaccaccgcacactcgacaaggtgaccgaacgcttccttggcaagcacaagatcggcaccaccggccgtggcatcggcccggcctacgcggacaagatcaaccgtgtcggcatccgcgtgcatgacctgttcaacgccgaccatctgcacgacaaggtggaggccagcctacaccagaagaaccagatgctggtcaagctctacaaccgtcgtccgattgacgtggaccagaccaccgaggagctgctgaagctcggcgaacgcctcaagccgtacgtggccaacaccggcctgattctcaacaaggcgcttgacgaaggcaagaccgtactgttcgaaggcgctcaggccaccatgcttgacgtggaccacggcacctacccgttcgtcacctcttccaacccgaccgccggcggcgcctgcaccggcaccggcgtgggccccaccaagatcacccgcgtagtcggcgtctccaaggcctacgtcactcgcgtgggcgaaggcccattccccaccgaactgctggacgagtccggcgaatggctgcgtcagcagggccacgaattcggcgtgaccaccggccgcccgcgtcgctgtggttggttcgatgcagtcgtcaaccggtacgcctcccaggtcaacggcctgaccgacatcgtgctcaccaagcttgacgtgctcaccggtctgaaggagattccgatctgcgtggcttacgacgtggacggcgaacgtcacgacgatatgccgaccgatcaggccgctttcgccgccgccaagccgatttacgagaccatgcccggctgggatgaagacatctccgactgccactccttcgacgagctgcccgccacctgccaggcctacgtcaagcgtttggaagagctgagcggctgccgtatctccgcgatcggcaccggtccgcagcgcgatcatgtcatccagatcaattcgctggtcgactgaccgtctgcaacgaatttcccggcttgactggtaacgacgcggcacatgatatccgccggctgattccgcgattcgaccacttgaagtggaagatggcggcggccggcatagtcattggtctggtttcaggattgctggttgtcgtataccgtctcggcatcgaatacagcacggatgcgtcccgttggatatatgcgcggattcgcgagaccccgtggctgattgcgccgtgggcggttgccgcggtggcggccgcgctagcaatcgcgtggatggtcggcaaggagccgatggctggtggcagcggcatcccgcagaccaacggcgtggtgatatgcggcttgaagatgcgttggcagacgattctgccagtccgtttcgtcggtggactgttgggcgcgttgtttggtctgtcgctcggccgtgaggggccgtccattcagattggtgcgtcgggcgcgcagtgtgtgtcccaccgtttgcgcggccgccgccgtgaggacatgcaggagcattatctggtcaccgccggtgccgcggccggcttgtccgccgcgttcagcgcgccgctgtccggcatgatgttcgctttggaaggggtgcatcggagtttttcccctgtgattctgatgggcgccaccgccgcatcgctgaccgccgatttcgtctcaaaatactgtttcggtctgcgtccggttttggatttcggtgatatcggtcagctgtcgttggaagagtatgtgtggctgattccgttgggattggtggccggtttggttggttcgctgatgaaccgctcgttgcttggcttccagacgctgtacggcaaactgccggcatggagccgcccgatgattgcgattgcgatcgcgttgcctgtcggcatctggttgcccgacgtgctcggcggcggctcgaatctgattgataccgccgaacatgcgcgcgtcggcttgggaatgctgtgtctgctgttcgtggcgaagatgctgttcacatccacgagtttcggctcaggcgcgcctggcggtattttcatgccgattcttgcggtcggttcgttggccggcggcatctgcggtgaagtgttgcatcgattcggtgatctgccatccgacgcagtggcggtgtttgcggtgtgcgtgatgacgggcacgctcgccgcgtccgtgaaaacgccgatcacgtcgattctgttggctgtggagatgtctggaacgttgacgcacatgctgccggtcgcggccgtcgctttcgtcgcgctgttggtgtccgatttgctgcgcaccaaaccgatttatggggagttgctggagcggtacgtgcgcgcgcaaggcatgcagatggcgatcgcaagccatgtgggcagcggcattatggaactgccattggaaatgggagcgattgcggacggcaagcgggtgtgtgacgtgcgttggccgtctgggtgcctgatcatcggcctgcgtcgcggcgaaagcgagatcgtgccgcgcggcgatacacggctgcgtgccggcgactatctggtggtgctgttcagtggcgaggaggagcgcgaggtgcgacctgcgatgcggcggctgtgtgatgcccggcttgactgagcctggctgaattcggctggactctggatgtacgaatctgcggaatcggacatccagggtgcatacgttggcgctccgtgtaaactcatatgcgttaggaaggcggcaaccgcggcccagctcgttgttgcacggcctatgggcggaacaacgctgtccgcggaaggccagtacagggggagcgcaatggaatcgcaagaacaatcgccgggagacgtggtgactgcgggtgaggactcacatcccatcacgcaggcaatcgacactgttgaggtgatgcatgctggtgcaaccgcgcccgccgctaacaccatggatccgcctacgattcccctggcgccgatgaaacgtatgcaggcgcggttcaatccgctcgccgacggactgatgtatgttgtggtgttcgtcggtggatttgttggagtcggctgtcggcatgcgttggatatgctcctgccgtcggtcagcgggacgccattcgttgtgggcacgtttgtgtcgaatatggtcgcctgcttcctgttcgcgatgctgaccgaattcatggcgaccgcttcgtggctgcgtcgccgggtgcggcaggttgtcagccgtggcgttgggctcggcttgctcggcgggctttcgacgatgtccggcgtgatgctggaaacgatggaaggtctgcacgagcggcatatcgccagtgcgcttggctatcttgcgggaaattttgcaggcggtttgctcactgccgccgccggcgtggttctgatgcaggcactgctgtcacggagtactcgaaagcgggttcggggtgcgttttcagctgtttccgtgtccgattctgccgaatcggacacgcagggcgtacgccatgtgaaagtggccgacgtggcgcgttctgccgcgcaggccgcaatggaagccgcgcagacggcccagcagattgcacagacgggacaggttccgcgagtcgaaacaccaaccgtgccgccgaccgccagccagcctatgcagacaggccgcgttccgcagattcctccgctggtcgttcctcagctgacacagtcatcgcagccgttgttgcgcgagccggatacttcagacttggggcagctgcccgagccgattcagcagtcgcaaccaatccagcagccccagcagcagtcgcagccaatccagcagccggccaacccgcttccacccagcttcgagcccaaaccgatcactgcggagatttcgcttgtcgccgacccgactaccggggaggtgcgctgatgatgtggatgatctgtctgttcggcggtctgggagccatggcccgttacgtgctcgacgtgtcaattcaacaaggctggaaccgcgagaatcgaagaacgaatcgcaacttcccgctatccacgctcgtcatcaacggcgtcgcctcgctatgcgcgggcatcgccatgatgtcctactattcgcaatcggtggatatggacacggtcatgatgttcgttgtcggatttctcggtggtttctcaacattctccacggcgctcaacgaagtggtttcattgattcgccagcgtcgttttacgctggctctgggctatggaatagcaaccgtcgcggtgcctctcatttgtgtggccgccggtttcggcattgcgctgcttgccaatccggcgtaattttcacgttacacggacggtcgctgagtaacgtgaaagaaatctgagcgcaaccgccatcaaggccgccagtccggatgcaacgctggtgattgcattcgaccagaccaagccgctgctgaaggccttcgcctccgcgggagtcgacactaagaagctgtatttcgttgccggactgtcgaacaggttcgagagaatgtaaatgaatgtaatatttcgtggtaagcacgtgagcatacaacgatagaacagtgatgacggggaaggtgcgatcatggtcggcatgcgcgatgtggcgaagaaggccggggtgtctctgagcaccgtctcgctggtggtgaacggcaacgggtacgtgtctgatgacatgcgcgaacgtgtgcgcaaagccatgcaagccctcaattatgtgccgaacgagcttgcccgcaatctgtatcatgattgcacgaatctggtcggcgtcatcgtgcccaccatccgccacccgttctttgcgacgtttaccgcacatctgcagcatgcgctcgccgcgcaaggattacgcactatgctgtgctctaccgcagatgaggcggacggcgaaatccagtatgtcgacatgttgcgtcggcacatgatggacggcatcgtcatgtgtgcgcacacttcgcatcccggcgattattggacgtcgattcatcgcccgatcgtcgcgttcgaccgtgtgcttggagacggtatttcgtcaatcggatccgaccacgagcagggtgggcgattgattgcgcagatgctgatccgcaatggtgccaaacatgtggtgatgattggcggtccgcgagatcaattcttcgatttggctgcgcgcggagaagtcgaggaaggaccgttcgatttgggaaagaccacgttcccgacggtgcgctactacctcacgttggaacaggaattgacctccgcaggcgtgaaatacgagtatgttgaagctggcgaagtgatggattttgccggctatcatcgtgcggtcagcaatgcgctcgacaaggtgacgaccgacggcgtcgatgccgtggtcagttccgatattggtgcatcgttctgcgtgcgcgaagcgttgggccgtggaatttccattcctgacgagctgcagatcgttgcctacgatggtacgtatttgactgatttggccggcatgaagctgaccgcggtcgcgcaggatttctcggcgatcgcacagtcggcggccgaccatatcgtgcaggcgattgccaatgaggaagtggccgcggctaacgcttcacgcaagaacatccccaagccgttcgagccgaacgtgcttattcccatgacactggtgccaggcgataccacgcgttgatactgtgcgtcttcatgcgtgtgcccggtgtggatcgcatcgatttcagcggcgtccacaaccggcgaacgcccgtcgatagttgtgctcatcattcgacttgtgcacatgtgtccgattctgccgaatcggacgtctgagttccgaaaaatgtgttctgtgtgtccgattctggagaatcggtcatgtgtgatgtgaattgggatgtttggatgtccgtttctgcagaatcatctttgctctgtactcgttgattcgcaaatacggcgcatggctcgtcataccggccatgctcggcggcgcggccttcctggcggactcggtgctgacgccggccgtgtcgatctcgtccgccgtcgaaggcctgaagacgctgccggcgttggagcatctgttcaccgagaacaaggatctgacgatgatgatcaccgcggtgatcatcgtgatcctgttcgccgtgcagtcgcgcggcaccgaatcgatcggcaaggtcttcggctcggtggtgatggtctggttcgcgttcctggcgatcgtcggcgtggtagccatcggcaacgactggtccgtgctcgccgcactcaacccgtactacggcatcaagttcctgttcagtccgaataacgccaccggtctggcgctgatgggcaccgtgttcctttcgaccaccggcgccgaggcgctgtactcggatatgggccacgtgggccgcggcaacatctacttcacctggccgttcatcaaggtggcgctggtgctcaactacttcggccagggcgcgtggatgctgcgcaaccagaacaaccccgaactggccgacgccgaggggatcaacccgttcttccagatgatggatccgaacgtgcgctatgtggccgtcgtgctgtcggtcaccgccggcatcatcgcctcccaggcgctgattacgggcgcgttcaccatggtctccgaggccaccggcctcaactggatgccgcatctgcaggtccgttaccctgcccgtacccgcggccagctgtacattccggtcgtcaacgtggtgctgtgcgtggccacgctggccgtgctgctgctgttccgcgattcggaacatatctcggcggcctacggcttggcactgaccatcacgatgatcaccaccacgatcctgctgggcatctacctgtggcaccgcagcaacaagttcggcgccgttgtgttcaccgtcgtgttcctggcgatccaggtcctgttcttcgccgcctcgatggccaagttcctgcacggcggctggttcacgctgctgctcacgctggcgatcctcatgatcatgtacacgtggaacgagggcaccaaactggagcgctcgcagcgtcggcacatgatgccgaaggacttcctccccgcgctggacaagctgcacggcgatagccgcatccaccggttcgcggacaacatcgtctacctgaccagcgatccggacctgaagcgtctcgatacggacatcttcttctcgatcttcgccgaccaccccaagcgcgcccgcgcatggtgggcggtggccgtcgagaccaccgacgagccgttcacccgtgagtattcggtcgagagcttcggtaccgactacctgttccgtgtgcgcatccgcctcggcttcaaggtctcgcagtccatcccggcctacctgcatcagatcatgcacgatctggagaagaccggcgagctgccgaaccagcagtcgatctacccgaagcttgacgccgatcccggcatcggcaccatccgctacgtggtgatccacaaggcgctgatgctcgagtcgaaggtctccggccgtggcgccctctcgctgcagatcaagtacgcgatccgccgcgtggccggttccccggtcaagtggttcggcctggcgccgtacaacccgctggtcgaggtgcagccgctgttcgtgtccacgcgccgcccgccgcgcctgacccgcgtggccagccaggcgcccaagcgcgagggctgagccggcaggccgaacagccggtgcgagccgggtggcctaatggcatgtcagggggccgcgaaccgtcatcgtacggttcgcggcctttgcatatgcgaatgatgcagagtgggcggtactgcttgtgaatgtagcgggtggacgggtgacgtggttgatgccttttgccgtatgttcacggtggctatgcgtcggatgggactgtaattcgacttcttgggatcttttttgctgcagtggtgcgccaaaaggtctcagccgtctctgcgccacgccttccggcagtcagtacaaggttgtactacactggtggctgtcacacggatgtccccggtcgcccgcgcctccgcggtacatcgttgtatggatacgtgtcacgtatgcagagtgcatgcagatatgtagaaaggaatcccatgccccagcaggaccatctgaccgcacgtctcgtcgtcgatgacgattttgaggtcgctccggtcaacaatcgtctgttcggttcgttcgtcgagcaccttggccgttgcgtgtacaccggcatctacgagcccgaccacccgaccgccgacgagcacggcttccgcaaggacgtcatcgacctggtcaaggaactcggcgccaccaccatccgctacccgggcggcaacttcgtgtccggctaccgctgggaggacggcatcggccccaagcaggaacgtccccgtcgactcgatctggcctggcattccaccgaaaccaacgaattcggcctgcacgagatggccgaatggcttgaggccaccggcggcaacgagctgatggaggccgtcaacctgggcacgcgcggcctgcaggaggccctggacctgctggagtacgcgaacgtgcccggcggcaccgagctgtcggaacgtcgccgcgccaacggcgccgacaagccgttcgatatccgcatgtggtgcctgggcaacgagatggacggcccgtggcagctcggccacaagtccgccgaggactacggcatgctcgccgcctccgtggccgccggcatgcgccagatcgatccggacgtggaactggtggtgtgcggctcctccgcccatggcatgccgaccttcggcaagtgggagcagaccgttcttgagaagacctacgagaacgtgaacttcgtctcctgccacgcctactaccagccgttcttcaaggaggacggcacgcgcgacatggccagcttcctggcctccggcgtggatatggacggcttcatcaaggacgtggccgccaccatcgacgccaccaaggcccatctgaagagcgcgcacgacgtgtacatctcgttcgatgaatggaatgtctggtaccagggtgaggagccgagcaagacccccgagggcatcggcaactggccggtggccccgcgtctgctggaggacatctacaccgccgccgacgccgtggtgttcggcgatctgatgatcacgctgctcaagaacgccgaccgcgtgcgcgccgccagcctggcgcagctggtcaatgtcatcgccccgatcatgacggagccgggcggcccggcctggcgccagaccacgttccacccgttctccgtgaccgcgcgcctggccaagggcggcaccgtgctggagccgaagctgtccgccggcaccgtggatacgccgcgctatggcgaggtcgacggcgtgaacgccgtggccgtgcgctgcaccgacggctcgctcgccgtgtttgcggtgaaccgttcgctcgaggcgaccgccgagttcgagatcaggctgcaggacggcgcgcagccggcatccgtcgaggcgcagacgctgcacgacgacgatctgttcgccgcgaatacgctctacgaccagaaccgtgtgaccccgcacgccaacgggtcggccatgtacgatgccgagtccggcgtggtccgcgtctccctgccgccggtgagttggaccgccctgcacatcaagtgacgcgatgggccgcgcggtccgttccggagaaggacggatcgcacggcccttgcttcccgggccgggcggaagggaccggaccggccggggaaaacgcgttatgctggaatcagacgggcgttccgcctgaaccgtgcggaacatgcccgatggtgcgacgagaggggtgctgtggcgaaacgggtgaccatcaccgacgtggcgcgcgagacgggcgtctccatcaaaacggtgtcgaatgtgctgaacaacaccggcagtatgcgcccggagacgcgccagcgtgtccaggatgccatcgaacgcctcggataccgcgttaacgtgtccgcccgcgccatgaaaaccggcggcacgaagctcatcggactggccatcaccgatttctgccagccgttcatgccctatctcgccgacagcatcgtggcggcggcacgttcccgcgggtacgcggtgatcaccgatacctacaacagcgccggcggcttggcgcaggcgatcccggagacgaagaagctggccgcggacggctggattttcttcatgggctcgccgatcacggatcgcacgatactgcaccagccgtatccgttggtgattgtgggcgattacgatacgcagggactggccgattgggtcacgatgccgaacgtggaggccgtacgcaccgcggtgggggcgctgctggattcgggatgccgtaggatcgcgttgatcggcggcaccgcggagaacgcatgcccggatgccgaccgcgagtcgcggcccgaaaccaccagcacgatgcgtacccgcggctatgtgttggcccatgaggagcgtggcctgcaggtcgattggcggctggtccgtaacgcggattgggtgcagtccggcggccgcgatgcggtggcggggctgttggacgatccggatgcgccgcgtccggatgcggtcatgtgcctgaacgacgcgctcgccatcggggtgattcatgagctgcagcggcgcggcgtgcgcgtgccgcaggatatgcaggtcattgggttcgacaacgtgccggatgccgagtactgcatgcccggattgacgacgatcgacccgcatgtggatgattacgcgcgacatgccgtggatatgctgatcgcgcgcatcgaggggtcggcggatccgttccgcacgtatgtgacctcctacgatctggtgcgtcgtgcctcgacgtgttgacggcccggcgttcgcctggacatgggtctgtgacgggctgctgtcgcctctcccgtggcgtattccgggagaggcgacatgcgggctaggatcggagcagcacctccgtcagcgcttgacggacggcgctcggcatatgcgaatcggagcaatcttccatgtccggcccgctgacgtgctcgagtgaatccatcgtggccaatgcgtcgatgccgttctccgttatggcggcataagcctgttccttggtcagatatcgcatttcggcatgccgaaggatgtcgaagacgtcttccatgcggggatcgggggccatcgtcgtgtcgccgatggtgacacgtatctcgctgcgggtggatacgtcggcgaccgttacctgcaatgtgagggtttcggcatcataccggcgatccgaatcgacggatgcgccgtcggcctgtacggatatgtcgctgtcggtaatgcctcggaacaggaaatcccatgttctccgggccggcagagcgtgaacgtctccctgggctggcgataccgtgagtgcggatgtggcgccgtccttgcgccatcgataggtgatcgcggtggtcgccggggtgatctgccgagagtaatgtcccgaatcctccatcagcgtgaagtcgccgtccgctccggggaagacgatgatctccagatgctgcgggttgtcgacggagttgatggaatccccctcggacaggggctgcatcggcacgatgccgccggccttcgcgaacacgggaattccgtcgagcggacgccagacggtcatgcgccgtccgttgggcgaagacgcgctataccggcgcccggtgaagaagtcgaaccagtcgccctgcggcagccatacgtcggccttgccccgtcgggaggatttatccatcggttccgtgatgggcgcggccagcagttcggtgccgaacatgtattcgttgggaacgtggtatgcggcgtcgatgtcgggcgatccccaatacatgggctccaccaggggaaggcctgtccgggatgcgcgccagttcatggtgtggaggtacggaatcatgcgatggcgcaggcggagcgcatcgtccatgatcgcacggagggggtgcggatgtttttttggacggtcaggcggccagtccaagacttctgcggtattgcacggggctcatccagtccagtgacttcttgatcctggtttcattgtagtgggtcaggtaggcggccaggcgttcgcggaactcctcgtagcccacgcccctccagtcccgcccgtagaataactcgttcttgagcctgccgaagaacccctcggcggccgcgttgtccgggctgcatcccttggcgctcatcgaccggatcagcccgtgctcctcgcagatgcggatccattcgtcccaccggtagtggcagccgcggtcggagttaaaccgacatcggtttaacagtgaccgtggatgccattaccggtggcccggatggctcgggctcatggaacgcttcgggctgacgcgctccatgagcgcgaagggctgttcgccggacaacgcggccgcggagggattcttcggcaggatgaagaccgaggcggtctaccccgagaagtgggaggaacacacccgcaacgaggtgctcgccttggtcgatgagtacatacgctggtacaaccacgagcgcatcaaacagtcgcttggttggatgagcccggtacaataccgtcaaagccaaggaatggctgcgtgattatctccaagaaaatgtccgcagccccttatcaatcggacacattggagtcggacaggctaagctgcatagaacaccgcatctaatcggttcgacacgcgcatttcactgcgcgactggacattgacgtccctttcgaggtaatatcgaaccggttcgatacatacgtgagtatgcaaatacgtaaacaacaaacaggcagatgcgcacgcaaattgcacccgcgcccatgagccaagggaggtcccatgaaaaacaaagtgcaactcatcacatacgccgatcgtctcggcgatggcactcttagctcgatgaccgacatcctgcgcacccgcttcgacggcgtgtatgacggcgtgcatatcctgccgttcttcactccgttcgatggtgcggatgcaggcttcgacccgatcgaccataccaaagtcgacgaacgtctcggcagctgggacgacgtcgccgaactctccaagacccacaacatcatggtcgacgccatcgtcaaccacatgagctgggaatccaagcagttccaagacgtgcttgaaaaaggtgaggaatccgagtattacccgatgtttctgaccatgagctccgtcttcccgaacggcgccaccgaagaggacctggccggcatctaccgtccgcgtccgggcctgccgttcacccactacaagttcgccggcaagacgcgcttggtctgggtgagcttcaccccgcagcaggttgatattgacaccgattccgacaagggttgggaatacctcatgtcgattttcgaccagatggccgcctctcacgtcagctacatccgcctcgacgccgtcggctacggcgctaaggaagctggcacgagctgcttcatgactccgaagacgttcaagctgatctcccgtctgcgtgaggagggcgtcaagcgcggccttgaaatcctcatcgaggttcacagctattacaagaagcaggtggagatcgcctccaaggtggaccgcgtctacgatttcgccctgccgccgctgcttctgcactcgctgttcaccggtcacgtcgaacccgtggcccactggaccgagatccgcccgaacaacgccgtcaccgtgctcgatacgcacgatggcatcggcgtgatcgacatcggctccgaccagctcgaccgctccctcaagggcctcgtgcccgacgaggacgtcgacaacctggtcaacaccatccatgccaacacccacggcgaatcccaggccgccaccggtgccgccgcgtccaacctcgacctctaccaggtcaactccacgtactactcggccctcggctgcaacgaccagcactacttggccgcccgcgccgtgcagttcttcctgccgggcgtgccgcaggtctactacgtgggcgcgctcgccggccgcaacgacatggaactgctgcgccgcaccaacaacggccgcgacatcaaccgccactactactccaccgccgaaatcgatgaaaacctcgaacgcccggtggtcaaggccctgaacgccctggccaagttccgcaacgagctgtctgcattcgatggcgagttcagctacgaggtcgatggcgacacgtccatcaccttccgctggaccgccgccgacggcgcgtccacggccgccctcaccttcgagcccggacgcggcctcggcacagacaacgccaccccggtcgccagccttgcctggagcgatgccgccggcgaccacgaaacccacgatctgctcgccaacccgccgattgccgatatcgactaaccgttggcccataaacgccactccgctgtgcgcgctccaagtagtgcgcccggcgtaagctgggttcatggaaagcaaaccgcccgcagtgcactgaagccagtgcgctcgggcggttttgcgtatgcggggttgaaggtcgtgctcctgcgggcgcggcccaagcatcccgccggaatcgacgagacgagcagcagaacagagaaagagcagcatcatgttggaaccgtatgtgcgtccgggtattgatgatcgcccggatttggacaaggtcctaagtcccgaagacaaagccgccgtggccagactggccatcaagaatcgccgccgcccgcccgaagcctctgcggaccagcctgaggctcaggctgtgcgattggcttccgccggttcttcggcagccgctgctgcagccgccagtgtggacactcccgcgccggatatgtcgtccgcctacctcgacatgcgcgatcccatggtcgccgtcaatggccaacgccctaccgcaggtcaggtctcccgactcaactggggtttcttcgctgcttcaattctggtcggcgcaccttgggtggcgttgaacaccattgccatgcccaacgcgattgcgcgtacattcggctatgacactgctgttgccggtcatatcgccatcaatccggccactggccgcccgttgcccgtcgccaccgaattggcgatgcccctggccgtgttggtgattgtcggcgtagtggcctccatgtttgcgatgccgctgatttcagtgttgtccgaccacacacgcacgccattgggccgtcgtaccccgtggatggttggcggaggtctgctgtgcgcgctgatcacgctgattctggggcagaatatcggcatcattgtgctttgtattttctgggtgttcctacagttcgcctatgcgatgctttccgtgccgttgaccagcgccatcagcgaacgggtgcccgacaagttccgccctcgcatcgaacgctggcatggcatcggtgtgatgctcggccaagcgcttggcgtgtgcatgggtgcacttggtgtgatgttcaattcgtttacgccgtttagttacaccgccgtgctatttgcagtgtccggtattgccaccgtattgattctgcccaaggagccttctagcactgagcagccgaaccagctttttgaccgcagtcaggtacttgaccaattgcgcccgccggcccacgctcccgagttctcccggatgttcgccgcccgtacgtgcatgatggccggtgttgggctgaccggtgtgtttctgtggtatctcgtacgtttctgggtttatggcaaggccgtggtacttacgtccgcgccgctgaccattccggccggattcctcattgccagtatggctgtggccacattgatcggtgccgcgctcgcctcctgggccgccgggccgatttccgagcgaatcgaggaaaagaacattcccgtggcccgtgtggtggccggtgcttgcctgctgtatgcgattggtctggggctcgcatggggccttggcgtctggtccaccggcactgcccgtgaaaacggcatgctgctgtttgcgttgatctccggattcgccttcggcatttacgattcgctcggacttgaactggtgatggactctttgcccgacccgcgccgagccggccacgacctcggcatttatgcgctcgccaactcggccggtctggcgctcgccgccatcatcggcgcgctactggtgaacgccttcgagcatagcttcggctattacctgctcttcccgtccgccatcgtcatggtgctgctggccggaatcgtcaccctcaccaccaaatctgccgaataataaaccggttcgagtacactggtcagcagtgatccagtccagtactcgcaggggagcaaaaccatggtcggcatgcgcgacgtagccaaagcggcaggggtgtccttaagcaccgtttcgttggtggtcaacaacaccggctacgtctcggccgatatgcgtgccaaagtcgagtccgcgatgcgccagctcaactacattcccaacgagctggcccgcaacctctaccggaaccgcaccaacaccatcggcgtgatcataccgaccatcgcccacccgttcttctccacactcaccgcgcatctgcagcgcgagttcgccgcgcgcgacctcaaaaccctattgtgttccaccgccgatgcggacaaaggcgagggcgaatacgtcgatatgctgcagcggcacatgatggacggtattatcatggccgcccacaccgagcatccggccgactactggacctccatccatcggccaattgtcgctttcgaccgcacgctcggtgagggtgtgccggtcgtccggtctgatcatgaacagggaggccgtctgattgctcgccagctcatcgattccggagcgcgccacgtggtgctcgtcggcggcccgcgctcccagttcgctgcggccaccacgttccccacgattcgctaccatctcaccgtcgagcgtctgctggccgatgccggcattgcctgcgattacgtggaagccggcgccgtggccgacatcgccgcccacgaagccaccgcatgcgccattttcgaacagtatcctgatgtcgacgccatcgtcggctccgatgtggtggcatccgtggcattgcaggaagcctcacgacggggtatcgaggtgcctgctgatctgcaagtcatcgcctatgacggcactctcatggccgaaaccgccggcaaacgcctgaccgcgattcgacaggacttcccggccatcgccgccgcgctcgccgtccgcatggactcacagatcgccgccgacggtggccccgcctctccgtccaagaacgatagcgcttcggacgttgacacccaacccactcccgaagaagtcatccccgtagccctcatccccggcgaaactacccggtgactcctatcttggctcccctctctgaggctgagctgtgaagcaaacagtccggtggactgtttgtaggcgaaggcgagccgggaggcgagcaggcagactgcgggcggtagcccgtctgtaattgcggccgagctggcggcgtaggcgactgaggggagccgagtcacggccgcccacagtcacccatctcacatgactcctacgtcacaatgtccacaatgtgaacccttgctggattggcaagacatacaaacctatgtttacattccagttcaggtcgaacggcctgaggaaataccgaaaggaggccacgcgatgactggattcaatgcttctgcgtttgtatccgcacgaattattagcccgtcttcgctggcggactaattcggcactgatgcttgaagccccgtcaacgaaggcagggccaatcaagctgacacaatcggcacggccctgcatgatgcggggctttttttgttgcgctcacaaggcttacggcagaatcccgcagacggaaacggtagcggacagtacacggcaacaacacagcgacagaacaacaacctccctgtggggcgaaataatcgcccgccgatgagagtgaacgagagcaaaacaggagtaacaatgactgcagcagtcgaagagactggcttagggcaggcggcaggtaaagccgctaccttggtacgcgattcggtcaagaccgtgatcgccgcgtcgatggtcggtaccgccatcgaattctatgacttctacgcctacggcaccgccgcggcaaactacttcccgcacatcttcttctccgcgaaggacaaccccaccgtcgcactgctgatgagcttgctgaccttcgccgtcgccttcatcgcccgcccgctgggctcgctgatcttcggccacttcggcgatcgcatgggccgcaagaccacgctggtcgtcagcctgatgaccatgggtgtcggcaccttcctgattggctgcctgcccacctacgatcaggtcggcgttggtgcagtcgccatcctctgcctgctgcgtttcatccagggcatcggcctgggcggcgaatggtccggcgcggcactggtcgccaccgagaacgcgcctgaagacaagcgcgcactgtacggctccttcccggagctcggcgccccgatcggcttcttcctgtccaacggcacctacttcgtgctcgaatccttcaacaatcaggacgcgatgctggcttggggctggcgtgtgccgttcctgctgtccgccatcctggtgatcgtcggtctcgtggtccgcgttcacatggaggagaccccgatcttccgtatggctcaggagcagaagaaggttgtcaagtccccgctgaccgaggtcttccgcaagtcttggcgtcaggtgctgcaggccaccttccttgtggctgtgacctacacgctgttctacacgctcgccacctggtccctcgcttggggcaccaaggagcagggcgaaggcggcggcaaccttggcttcaccaaccaggaatacctgctcatgctcatgatctccatctgcgtgttcgccctgttcatcgtgctgtcctgcctgtacgcggacaagatcggccgccgtcgcgtgctgaccttctcctcctgcgcacttgtggtgttcgccgtactcttcccgttcctgctggacggtggtctggtcggccagaagaacttcttcgccaacatggtgttcctgtgcgtcggctttgccctgatgggcatcgccttcggcccgatcggcgccttcctgcctgagctgttcgacgccaacgtgcgttactccggctccggcatcggctacaacctggccgccatcgtcggcgcggctttcgtgccgaccatcgccacttggctgagctcccactggggcgtccactccgtgggcctctaccttgccgtgatggccgtgtgctgcctcgtctccgtgctcacctgcaaggagactaaggacgttgactttaccaagtgacgatgttcacaacgtgaaaacccctaattccactaagtgaacccctacagggcttttccgatgcgacgggactaaacctgcatatcggaaaagcccacaaggaaagccacaacagaatatcgctcagcgaaaccccgcagaacgcaagaaaaattcaaccccataaataaacaaataaataaaaggagcgccaaaaatggcagcaactatctggtacgagaaggacgccgatctgtccgtgttcgatggcaagaaggtggctatcctgggctacggttctcagggtcacgcccacgcgctgaacctgcgtgactccggtgtcgacgtggtcgtcggcctgcgtcctacctccaagtccgtggagttcgccaaggagcagggccttgaggtcaaaccggttggtgaggccgtcgctgaggctgacgttgtgatgattcttctgcctgaccagtaccaggcagccgtctacaagaaggacgttgagccgaacctgaagccgggcgctgccctggccttcgcccacggcttcaacatccactacggttacatcaagccgtctgaggatcacccggtgttcatggttgccccgaagggcccgggccacatcgttcgtcgtgagtacgccgctggccgtggtgtcccggtcgtcgttgctgttgagcaggacccggacggcaagacctggccgctgtgcctggcttacgccaaggctctgggcgctctgcgtgcaggcgccatcaagaccaccttcaccgaggagaccgagaccgatctgttcggtgagcaggacgtcctcatgggcggcatcaaccacctgtgcgacctcggcttcgacgtgctgaccgaggctggctaccagccggaaatcgcctacttcgaggtgttccacgagctgaagatgctggtcgacctcgctaacgagggtggtctgaacaaggctcgttggtcctgctctgacaccgctcagtacggcgactacacctccaccgtcatcaccgaggagaccaagaagcgcatgcagtatcagctcaagcgcattcaggatggctccttcgccaaggagttcatggatgaccaggctgctggcgccccgaagttcaagaagctgcaggaagagtactctcacccgcacctcgagaccgttggcccgaagctgcgcgccatgttctcctggaataacgccgaggccaaggacaaggatgagaccgagtccttcaacggcaagattgctcgtacccaggttcagtgattgtcgcccctgaaggggatttaagctagcaaaccgccgttcccgcccatacgggagcggcggttttgtgttgttgcgcgcagcgaatcattctcaataacaactatgcgctgatttcttgcaggcaaacgaacaccgaatatgcaaggtcgttgatatctcagcctttccccatatgtgggattgtgcgattctgttcaaaagggtgcagagttgttatcgagaatcgttctctgcacacggctgtccatactccaatagtgacctagctcacgttgtggactccagcggggctgcgacggcgttctcggtaggattgatttcggtttgaaggacacaatcctcgcaaaacaggacttatctgcacaccgtagatacccccggcgcccagcggcgccacaacccactactgaaaaggagtgccaataatggcagcacagatctggtatgagaacgacggtgatctctctgttctcgaaggcaagaaggtcgcaatcatcggctacggctcccagggccacgcccacgcgctgaaccttcgcgattccggtgtcgacgtggtcgtcggcctgcgtccgacctccaagtcggtcgacttcgccaaggagcagggcctcgaggtcaagtccgtggccgaggcttccgccgaggccgacgtgatcatgattctggcccccgaccagtaccagcgcaccatctgggccaacgacatcgagcccaacatcaagccgggtgctgctgttgcgttcgctcatggcttcaacattcactacggctacatcaagccgtctgaggatcacccggtgttcatggttgccccgaagggcccgggccacatcgttcgtcgtgagtacgccgctggccgtggcgtgccggtcgtcgtggccgtcgagcaggatccgcgtggcgacggctgggctctgaccctggcctacgccaaggccctcggtgccctgcgcgccggtgccatcaagaccaccttcaaggaagagaccgagaccgatctcttcggcgagcagaacgtgctcatgggtggcgtgaacaagctcgtcgagatgggcttcgaagtcctgaccgacgccggctaccagccggaaatcgcctacttcgaggtctgccacgagctcaagatgctcgtcgacctgatgaacgagggcggtctgaacaaggctcgttggtcctgctctgacaccgctcagtacggcgactacgtcaacaccgtcatcaacgaggactgccgcaagcgcatggaataccacctgcagcgcatccaggacggctccttcgccaaggagttcatcgacgatcaggatgccggcgccccgcacttcaaggagctgcaggagaagtactccaacgagcgcatcgagaccgtcggcccgaagctgcgcgccatgttctcctggaacaaggatggcgtcaaggatgccgacgaggccaactccttcaccggcaagatcgcccgcgctcaggttcagtgagcccctgtagctcccgctggcgcataagcgcctgaggggagtacccagcacgtaccaaaaggccgccgctccgattcattcggaacggcggccttctagtatggtcccaccacgtagccaaacttccaccacgcagtgaaccacagagttacttgattacccacgcagaggtgtcggtgggaagttgaccgtcgggagtcagcgggccggaagtgagcaccacagagccttcgggcagtgagaccggggcagtgccaaagttagtaaccgaggtgaacgtgcgtccctcaaccgccgcacggcggtacgccaccacgtccgctcccatatccacctgctcggcggtggtgtcgcgcgtggcggtcagcgactcctgacgaatcgccaacgccgcatgatacaacgtgtacatcgaatccgggtcggcctgctccacgtccaccgcgtaatccttgaaccacagcggctgcggcaggtgcgggtcggcggccggcgtcacgccatcggcgcgaaccgcaggggagaagccgaaggaagcgcccgtgccgaactggccggcggcgcacagcggcacatggttctcgccggtgccatcgtcggccggagccggacggctgaaatcggccagagcgggctcgtcggaagcggtccaaggcagaggcacgcggcaaccgtcacggcccttatccatcgtggcctgagcggtgtggaaagcggtcggatcctccagtcgatcccacggaatatcggccacctcaaacagacccagctcctcgccctgataaatataggcggcgccgggcagaccaagctccatcagcgcggcggcacgggcacggcgggtgccgagctcgcggtcttcgggatatgtggtgccgttgcgcagcagccagtcgtgcggcagctggtggtagggcgcgcccttgacctgcggcagaccgtagcgggaggggctgcgcggcacgtcgtgattgttcatgacccacgtggtggtggagccgccggtttcggccgccgccttaagacccgcggcgatggccttgcggaactcgtcggcataccagttggcctgcgcgaagtcgaagttgaaggactggcccagctcgtccatcgaagcgtacaggtgctggtgctcaggcaccacccacgcctcggccacggcaaagcgcggcgggttgtattcgttgaacaccttgcgccactcgcggtagatgtcgtgcacctcacgacggtcgaacagcgggtggctgaagtcatgattcagcacgccgaccacgctgtattcgcggccgagctcttccaacggcttggattcgagatccttggccaggccgtgcgccacgtcgatgcggaagccgtcggtgccgtggtcggaccagaaacgtagggtcttcttgaactcctcgtggatgtccggattcttccagttgacgtccggctgcgccttatcgaacaggtgcagataccactggccgtcggccacgcgcgcccaggccgggccgccgaagaaggattgccagtcgttgggcggcagttcgccgtgctcgccgcggccgtcgcggaagatgtagcggtcgcgcgccggggagccgggctcggcggcgagggcctcttggaagaacacgtgcttgtcggcggtgtggttgggcacgatgtccacgatcactttgatgccggcctcgtgcgcggcctcggccatcgcgtcgaagtcgtccatggtgcctaggcgcgggtcgacgttgcggtagtcgatcacgtcgtagccgccgtccgccagatccgaggggtagaacggggagagccagatcgcgtcgacgccgaggttcttcaggtaatccatcttctcggtgacgccggcgatgtcgccgagtccgtcgccgttgacgtccttgaagctgcgcgggtagatctggtagacgacggcctgcttccaccagtcgtcattgaggttgttggcggtcatgccgattccttcctgttccgggtgcgttgtggttgggttgttccggttgtgctcgaactgctgtgtgaaggcccaaccgttgtattgatgatgacaacgatatcatgtgaattacgcatgcaaaagtcgatttatcggcgttttgcggtggtaacgtagtcacgcctgcgcggacgctgctgttgcggcaggcggcgcggtggtttcgcgcagtattagcggagtgtccggccgtacgaatgccggttcgattgacttgcccgcaatggcatccaataccatgtgcccggcggccacgcccattgcgaacgggtcctgatgcagtgtggtcagtcccacggcggcggacagggtggaatcgtcgaagccgatgatggagatgtcctgaggtacccgccgcccgtattgacgcaggcgatacagcacgggtgcggccatttcatcatcctcaaaacagaaggcggtgatgctgggggaggcgttcagtacggcgttcaatgccgcgttgctttcgccaagaccgcgttgaatgctcaggggcgttagctcgatccccggatgggcggcagcggcatcaatgacgccctgcaaacgagcctcggcactgtagcgcatgttggtttcggtcggggcgctgccgacgaacgcgatatgccggtggccgagtgcaatcaggtgctcgatggccgaacgtgtggcggcgtaatcgtcaatgctcacgcctgcgtcgaacccatcggtggagggaatgttgatgccgacaatcggcacgtgcatatgcttcagtcgctccacttcagccggctcaatgtcgaaggagctgacaatcaccgcatccgcattgcgtcgcacgggcaaatccgcaaagaagtcatggcgctcggcggcgttgcgcatggggtagggcacagtgtcgtagccggaggggcgcagcgccgagtcaaggccggcgaagatgtttgcattgaaccaggtggtgatggtctcgctggccagcagcgcaatgcggaacgactggccggacttcagtgcggcggccgagcgagagacggagtagtcgagcttttcggccgcggtcatcactcggtctcgagtctctggaagcactagatccggcttggcgaaggttcgggacaccgtggatacggaaacgccggcctcgcgggccaccgcttgaatgcttgccttggtcatagccgtcgctccttcgccgtcgcgaacaatcattgtcatgacaacgataacatgcccataacaagtcgtcgtcttcggctatctcgattacgaggggctgatttagaccaatttcccattgccggaatcgatcaccgcttctctcggcgcatcacggcggctagggactgcacgcgtggcaggtcgaagacctcgtcggtatgtaccacgtggcctgagctgtccgccagcggcacgcgccagttcgaatactctctggaagtgcccggctgattctgggagcggcattcgcccacgccgtccaccagcgctgcctgcagcagcagcgacggcgtatcggtgagcatggcgtgcatcgcttccacgatttcctgcacatggccttccacatcatccgccacggtctgcgagatatagccgttctccaccagacggttcatcatggccgtgcgctcggccatcgccgaggcggcgaatgtctccaccggctcgctcaggagatgcagctcctcgcgcagcttgacgtgtgcgaagttcaggtagccggcggtgggtggcagatcgtgcgtggtcaccgaggccaatgcctgtttgcgatagtccttgggtgcgcggtacgggtcgccggcgttcggcgaatcgtccacgcggttgaaccattccacgtcagtgccgagcacgccgtgatcggccagaatgcggcgcacgtaatccggtacggtgcccagatcctcgccaaccaccatgcctccggcgcgcgtggcctcgatggccagtactcccaacatcgcctcgtggttgtacgtcacgtatgcgccgttgcgggcaccgagcccctgcggaatccaccacaggcggaacaagcccagcacatggtcgatgcgcaccgcgcccgcgtgctcgtacatcgaatgcaccatctcgcggtacacctggtagccggtggcctccaggtagcgcgggttgaacggtggctggccccaatcctggccctgctggttatagaagtccggcgggcagccgaccgtgacgccacctgaggcgaagcgtcccggattggcccaggcatccgcgccgagcccgtgcacgcccacggccatgtcctgcatcagacccagcgtcatgccgtggtccagcgcctcctgctgcgcggcgttcacctgctcggcggcaatccactgcagccagcggttgaactcgaacaggtcgtggtgctcctcgacgagctggcgcacggccgggtcgtcgatggtcttctcgaagaaccaacggttcttgccccacggcgcgccccatacctcgaaacacaggcaccatgtggcgaaggaatcgaggtccgggccggcggtggccttgaaatgcttgaattcgagctcgcgcttgttgttgcggcccgcttcgaagatcaggcgcagcgccgggcgcttggcctcccacgccgcgttgatgtccatcggggtcgattcgtcgttgcgcgcggccaccgaatcatgcagcgcatccacctgcgcgcgcacgtcggccggcagtgtggcatattcggggatatcctgcggccggatgtacgtcacgttgaggaatcggcgcgattccggtagatacggcgatggctcaagcggcggaatcggcgcgccggcgtgaatcgggttgatgagcatgaagtcggccttggacttctcggcggcatctgccaaaagacgcttcagatcgccgtaatcgccgatgccccacgattcgcgggaccgcacggaatacatctgcgtcatccagccccaccgctggtgctcggcgaccgcctccggcacgggaatgcgcgcgggggcggcgatgatggccgccttgccctcgcgcccgtcaaccgtgacggtcagcgtgtggtagcccatcggcaggtcgggtgcgatggtcaagtccggcttgccggaattgaggttcggcagcagggcaaagtggccaaacgcggtgccgtcctccagttcgatggaggcggtgatgtccgcgtccgacgagcagttcagggtgatgccggtcggtttgccggtggtggcgacgatggtggaggggagcaaacgtttgctgttttccacctcaagttgggtcgtggagcgtacgatggcctcgtcgctggatgcgtccacgtcgagggccttgagtacggcgaccaaggccgcgtcgctgatttcggtgtaggtgccgagctggtcgatgaatgaggtggcaagtccgcaggctttggcgagcttgatgagcgggcgggcgagtcgttccgtgctttccgcgcgctgcggggcaccggaagcggcgttgttggtggtgtctgcgatggtgccggtgctggttgctgcgtcgttgccgtatgcgtcggtcatgatgactccttgcttgcaaatcgggtactgctagtcgtttgcattgctgttcgagggccgctctgcgttgaggttccggcaacctgacagaccaatgttcgagctgttctgcctctaccgtaactcatattgacaacgattgcaatacattcggtgagttggacgaggctagaggtgttggtgtttgtcgtgatggcccgttgactatccccagtcgactttgccgacagcctcgccggcggaggtgaggtcgaacgggtttaaccaaacacgacgaacgattgcggggagagcgtcagctgcccgccgctcacggccggttcaccaagactgagcagcacgtcggcgtcggaagagagctcgtccggcaggtattccgtgaggaatgaggcgattgaggcacctgaatcggcgttgaaataactggaatcgccttcgtgctccataggcgtgtcggtattgcgcagcaacaggttgtagccgttcgggtggccgtcccggcgccagtcgaggtagaggtccatgtcgaagccggcctgcatcgattcgttcggatggcctggacgccatcggcggaccgacctgggtggattccgataaggcggccgtatgggtgaccaactgggacaccgagcgcaacggctcctcgctcaccacccgtgacggcaccagctacctgctcgccaacgccttcatgctcgcctacgattacggccagccgcacatcttctccggctactactacgccggcgtcgacgacggcgctcccggcgccacccgcacctccgtgccggacatgacctgtccgaccgacggcatcgaaaccgccggcatctggcactgcgcgcaacgctggaccgccatccgcggcatgatcggcttccgcaacgccgtggccggcaccttcaccgccaccgtggccaagggctcggccgtcgccctatacgccggcgcgacgcccgcaaactgggccggcacccggaaatacgatccgtccgatcccgcctggttcaccggcgaaacaccgcataagggcgatgacaccgccgccaagtccgccgattccgcagcgtccgccaagtcaggcgacgccaagtccggaaaggcaacgtccgatgccatccgccgcgccgcaacgctcgccgccatcctcctgcccgtcatcgtcggcgtcacgttcatggcgatagctcgcaggaacggcaaagcccagtccgacaacagcggcccgaataacgactgattcggccccgctcagccgcgcacccgcggcgcggcggtggagtcgcgtaccagcagttgcacggggaagatctcgtgcggctggtccagggtgcgcccctcgataaggtccagggccttgcgcgcggcggcgacggccatgtcgtacggcttctggcgcacggtggtcagccccacctcgcccgagaacgtgctgttgtcgaatccggtgacggacaggtcggtcggaatcgccatgccgcattggcgcaggcggaagaacagcggaatcgccagcgaatcctgatggaagcacagggcagtcggggcgtcgtcgcgcgcgagcagcgcggtgagggcggcgtcgaccggatcgtcgccggcctgcatgtccatcgtctggccggtcacgccgtccagttcgctgcacgcctccaggaatccggtgacgcggttgtgcgagctgaagcccatcgtggcatcgaacgtctcgtacaaatacaacaggttgcggtggccgagcgtggtcagatggcgcacgatcagccggatgccggccttgtcgtcgatgcccacggaggcggtgaacccctgcgaggccgtgttgatgccgatgagcgggatccgcgtggtgttgagtcgcctgatttcggccggggtgatggcgaacgacgagacgatgaccgcgtccgcgttgccgcgcaccggcagttcgtcgaagaactcctcgcgcgcgcccgcgtcgccgatcggttggatgaccagatcgtagccggccgatcgcagcacttcgttgaggccttcgatgatgcgcgaggtgaaccagtcgagcttgctgctgcccaccagcagcgccacgcggtgggagcggcccgatttgaggatgccggccatgcgggataccgagaagtcgagttgttgggcggcctccatcaccttggcgcgcgttttggcggagaccatgtcagggcgggagaacgcgcgggagaccgtggcggtggagacgcctgcttgcctggcgacgtcctcgatgctggctttcatggcccctcccggtttttcaaagttgacggtgtgacaaacttctcttcattgtaaatcattgcagtacgttttacgacagtcatagtgcaatgggttgcgatattgcgacacgccgaaaatatagaccaatatggtctcaatagctttggaatgtaacaggttgcaaatgtaacggtttgcatggctgagaaagccgggttgccgaactagttcgacacccgtatactgaaccgtgttcacttagagcttgcgaggaagtaagggagataatgaagatcaagaaatctctcgccgcgctgactgcaaccgtgagcattatggcacttgcaaccggttgcagttcgagcggttcgtcaggcgtcgtcgacacccaggccgacaagggcctggccgtcatgggcgacaccatcacctacgaccccaaccacttggtcaacgacggccagcccatcgaactgggctactggtcctggggcgacgaaagcactgacccggtgatctccatgctccacgagtacgagaagatccacccgaacgtcaccttcaagatctcgcaggtggcttggagcgactactgggtcaagaccccgctctcgctcaagggcaacaagaacgcccccgtgctgttcaacgtccacaactccgaggatgccctgctccgcccgcacgccgtccgcctcgacggcgccagcgactggcgcatcttccaccaggtggtgctgccgatgagccgcaattccatcgccgcgctcgccatcttcaccttcctgtggaactgggaggactacctctggccgttcctcatgatcaccgatgacgacaagcagctgttgtcggtgggcctcaagatgttctccggccagtacggcaccgattacggcggactgttcgccgccacctccgtggccatcatcccggtggtcatcgtctacctggtgttccagaagcagttcatcgccggcattgccaccggctccggcaagtaaacccggccggtttcggccgaatccgaactgcgccgcggtctcccaccagtcccggggagccgcggccgcatcactcgtatcatcgtgaataaccgtacagaaagagtaaccatggcacaatcgccacaactcaagcattcgtctccgacctcgcccgatccgcaggacttccgcctcgacgccacgccggccatgcgcgccgacaatgtggtgtccggcgaccactggcgcatcggactcatcaccgattcactcgtgcgattcgaatggtccgattccggcgtattcgagaaccgcccgacccagaccgtcctgaaccgcgatttcggtagcccagtcgaacgccgcgtcaccgagcgtgacggccgcgtcatcatcgacaccgcggccctgaccatcgtctacgaccagcagccgttcagcaaggaaggcctgagtgtggtcgtcaaaggcgtggccgacacccagttcaacacctggcattacggcgacgcccagcgcggcaacctcaaaggcaccgcccgcacgctggacgaggcggacggcgccattgagcttgacaacggcgtgatctcgcgcgacggctgggccgtcatcgacgattccgccgccaacatcatcatcgaaaccgacacagtgaacggcaaggcgaacccgttcggcacctgggtatccccgcgcgccaccgccgaaacggacttgtacttcttcggctatggccaccgctacatcgaggccgtacgcgacttctatcgcctgaccggccccacgccgctcctgccgcgcttcgccatgggcaactggtggagccgctactaccggtacacgcaggacggctatctggccctgatggaccgcttcaagcgcgagggcatcccgttcaccacctccgtgatcgacatggactggcatcgcgtggacgacgtggacccgaagtacggttccggctggaccggctactcgtggaaccgcgaactgttccccgacccgccggccttcctcgccgacctgcaccggcgcggcctgcgcaccacactgaacgtccacccgcgcgacggcgtgcgcgcgttcgaggacgcctaccccgaagtcgccaagcgcgtcggcatcgacccggccaccgaggagaacgtggaattcgacctcaccaacccggacttcgtggacgcctatttcgacatgcaccaccgcatggaggccgaaggtgtcgacttctggtggctggactggcagcagggcggcgtgacccgccagaagggtctcgacccgctgtggatgctcaaccacatgcactacctcgactcagggcgcggcggcaactggccgctcaccttctcccggtacgccggccccggctcccaccgctacccggtcggcttctccggagacacgatcgtgacctgggaatcgctcgccttccagccgcagttcaccgccaccgcttccaacatcgggtatggctggtggagccacgacatcggcggccacatgttcggctaccgcaacgaagagctggaggcccgctggtaccagctcggcgcgttcagcccgatcaaccgactgcattcgtccaactcgccgttctccggcaaggagccgtggaacttcaaccgtgacgtgagcgccgcgatggtggacgcgctgcgtctgcgccacgcgatgatgccgtacttgtacaccatgaactaccgtgccgccgaagccggccgtccgctggtcgagccgatgtactggcagaacccggatacgccggacgcctacgaggtgccggacgagttccgcttcggcaccgagctcgtggtcgcgccgatcgtctccccggacgatgctgccgcctgccgcggccgcgccgacgcctggctgccgcagggggagtggttcgacttcttcgacggccgccgatacgtctcatccgacgccgccggccgccgactggaggtctggcgctcgctcgaccgcacgccggtgttcgccaaggccggcgcgatcgtgccgttgcaggacgtcgcggaatccggcgaagcgatcaactctatcgccaacccgcaggccctgcgcgtgctggtgttccctggtgccgacggctcgttcgtcatgcgcgaggatcgcggcacgtggggcgccaccagcgccgacaccgcgatagcgttcacgtggggcggggccgatgcgtcgcccagcgccttcaccgtcgcgccggttaccggcgatacgtccgccgtacccgagtcgcgcgactggacggtcgtgttccgcggcatcgcgccggtcgatgcggccagcggcgtgcgtgcatggtccggcgaggctccggtcgaggcaacggtggcgtacgacgaggcgaccatgagcctgaccgtgtccgtcaccggcatcagctcggctgccagtctgcgcatcgagattcccggcggtctgcgcatcgccgacaatccggtcgaatcggacgcgatggacctactgctgcacgcccagatgctctaccgcaccaaggagctcgcgctgcaggcggtccacaagctcggcatcggcgcgatcggcgccctgcgcaccatgaaccgtggtccgcgctacgccaacgatttctggatcaccgacatgcccgatgcggtggccggcgcgctcgaagaaattttgctgcgcagctgagcccggttgcagctttctgcaacatccgggtgcgccccggtatgcggcgataagttcggcatggttgccgaagagcgtggcataccgggtgcagtgcgtgggatggccttcgcgattgcactcatcgtgcggtcagtggaaaggaacttttcatgcacaaggtgaaacagcacaagggcgtcgcggtggccgccgcggtctgcgcggtcgcgatggcggcctcgctcgcgacccacgccggcgcggccggggaccggcgttattgactggctggcgttatcgagtgattggcggtatcaattagccggcgttattgatgagccggtgttgtcgattagccagcattatcgaccggcactgaagcatgcagtacccactgcccgcgtttctcccgcacatcccaatccccgtgcgcatgcagcacacgctcccgatagtacgcaagcccggaatgccgccccctcaaacgtcgcgtcaccttgacgcggacggtccgtcacatcaatggtgacgcggtcctgagcggcggaaaccagcaccacgtaacgctgcgtcgaatcggcatacctggcgatattgccaaacaattcccgcagaaaatcggcgacaaacactgtgtctgagttattcagcgcatcgatgcccccagcgacaataacgtcgccgacacaccccatgcgccgcaatcgcgcgccgccgctggcaagtctgatggcaaggctgatggcgcgccccagtcaccccttgcagttttctgtataagtggattttggctccaaacgcaccactccgtcatcgccgtcagtcactcccacaaaaaacttgagccaaacatactcaactttttgtgttgaaattgggaatagaacttgccaaatggaagttgagtgatgtaggctcaagtttggaaggtccaagagacgaccaatcggaacttgggcaaagaacgtaagaacaaacgagtaattaaggagcacacattatggcacgtgcagttggtatcgatctgggaaccacgaattcctgcatcgcaactcttgaaggtggcgagcccaccgttatcgtcaacgctgaaggcgcgcgcaccacgccgtctgtggtggccttctccaagtccggcgagatcctcgtcggcgaagtggccaagcgtcaggccgtgaccaacgttgaccgcactatttcttccgtcaagcgccacatgggctccgactggaccgtcgacatcgacggcaagaagtggaccccgcaggagatttccgcgcagatcctgatgaagctgaagagggatgctgaggcctacctcggcgagcccgtcaccgacgccgtcatcacctgcccggcatacttcaacgatgcccagcgtcaggccaccaaggacgccggcaagatcgccggcctgaacgtcctgcgtatcatcaacgagccgaccgcagccgctctggcctacggccttgagaagggcaaggaagacgagcgcatcctggtcttcgacctcggcggcggcaccttcgatgtctccctgctggagattggcaaggatgacgacggcttctccaccattcaggttcaggccaccaacggcgacaaccacctcggtggtgacgactgggatcagaagatcatcgattggctggtttccgaagtcaagaacaagtacggcgtcgacctgtccaaggacaagatcgcgctgcagcgtctgaaggaagccgctgagcaggcgaagaaggagctctcctcctccacctccaccagcatctccatgcagtacctggccatgacccctgacggcaccccggtgcacctggatgagactctgacccgtgcgcacttcgaggaaatgacctccgacctgctgggtcgctgccgcacgccgttcaacaacgtgctgcacgacgccggcatctccgtgagcgacatcgaccacgtggtgctcgtcggtggttccactcgtatgcccgccgtcaaggaactcgtcaaggagctcaccggtggtaaggaagcgaaccagtccgtgaacccggatgaggttgtggctgtcggtgccgccgtgcagtccggcgtcatcaagggcgaccgtaaggacgtcctgcttatcgacgtgaccccgctgtccctcggtatcgagaccaagggtggcatcatgaccaagctcatcgatcgcaacaccgccatcccgaccaagcgctccgaggtcttctccaccgctgaagacaaccagccgtccgtgctgattcaggtctaccagggtgagcgtgagttcgctcgcgacaacaagccgctgggcaccttcgagctgaccggcatcgctccggctccgcgtggcgtcccgcagatcgaggtcaccttcgacatcgacgccaacggcatcgtgcacgtgtccgctaaggacaagggcaccggcaaggagcagtccatgaccatcaccggtggttccggcctgccgaaggacgagatcgaccgcatggtcaaggaagccgaagctcatgaggctgaggacaagaagcgcaaggaagacgccgagacccgcaaccaggccgaggccttcgcctactccaccgagaagctcgtcaacgacaacaaggacaagctctccgacgacatcgtcaaggaagtcaccgacaaggtcaacgctctgaaggaagccctgaagggtgacgacaccgagaaggtcaagaccgctcagaccgagctgatgaccgccgcccagaagatcggccaggtcctctacgcccagcagggtgccgagggtgctgccgctggtgctgacggtgccggcgcttccgctggctccgcctccggttccgacgacgacaccgtcgaggccgaggtcgtggacgacgatgacgacaaggacaacaagtgatgtccgagtttaacaaggacgactacctgaacgacctgccggatccctcagatgctgaggctgccgctcaggcctcttcaggggctgacgcctccgccgagtccggctctgcgcaggattcggctgcccaggctccttccaatgaaggagccgacgcggctcctgccgcagctgagggagggaagactggcgaaggccagtccgattccgcagacaccctcaccccgctcggcaaggccaagaaggaagccgcagactacctcgaagccctgcaacgcgaacgtgcggagttcatcaactaccgcaatcgcacgcagaaggagcaggagcgcttccgccagcacggcatcatcgacgtgctgaccgcgctgctgcccgccctcgacgatatcgaccgcattcgcgaacacagcgagatggacgactcgttcaaggccgtcgccaccaagattgacaaggccttcgagaagttcggtgtcgagaagttcggcgaaaagggcgaggacttcgaccccaccaagcatgacgcgatcctgcacaagccggacgcggatgccgaaaaggaaacggttgacaccgtggtcgaggccggctaccgcatcggcgatcgcgtaatccgcgccgcccgagtagtagtagcctccccgcaaaactgacatccagctcgctgcaatgagttgacagtgccttagctccctctgatgagggagctgtcagcgaagctgactgagggagagaagccggccgcaggccgcggaagacagagggccacattcttgatgcccatagtccccgctatctttccctccgtcatcgctgcgcgatgccacctccctcatcagagggaggtgcaattacataagacttttctagaaaggagacatgaatggctgaaaacgaatggctcagcaaagacttctacaaagtccttggtgtctccaaggacgcttcggacgacgacatcaagaaggcgtaccgcaagctcgcccgcaaataccatcctgacgtcaacaagaccaaggaagccgaggagaagttcaaggacatctccgaagcctatgacgtgctgagcaagaaggaagatcgccagaagtacgacgcgattcgtcagttcggcatgggcggtgcccgcttcgccggcggttccggcaccggcggcttcgatgcttccggtttctccgacatctttggttccatgttcggccagggtgccggcggcaatggctcgcgcatccgcttctccacttcgggcggcggccccaacaacatcaacgacatcttctcgatgttcggcggtgctgcaggtcagggcggccagccgtatggcggctacggccaatcgccgtacggcaatgccggcggctatggctatgaggaggccccgcgccccgaaaacggcgaggaccgcaactccaagatcagcctgaccctgcgtcaggcggtcaagggcgctaccgtgtccctgtccgtggacggcaagaagttcaaggcccacgtgcctgcgggcgtcaaggacggacagaaaatcaagctggccggcaagggcaagccaggcatcaacggcggcaaggccggtgacctgtacctgcacgtcactgtcaagcccgatgccacattctcgatgcgcggccatgatatcgtcatggacctgcccgtaactgtgggccaggccgtggccggtggcaaggtcgaggccaaggatatcgacggcaatcccgtcaccttcaaggtgccggcaggctccagctccggcgcggaagtcaagctcgcgggacttggcgtccagcgcagcaaccagccgggcgacctgatcggccgtgtgcagatcatggtccccgccaagccgggtctggccgtcaagcacgccgccaaagaattcgacgaaaaagccggcgactatctcagcctgtaatcaggaggtgaacaatggcgcggttagccaaccagatgaagcagttatacgcgatgtgcgcaaccgcgctcgtgatgggcagggccgatctcgacggagccgatgacgtcggcttcgacatcgaactgcccatcttcaccgtcggccagaccgccgagttggccaacattcacccccagactctccgtcagtacgaccgcctcggtttggttcgtccgcagcgcaccgatggcggcgcacgccgctactgcctgcgcgacattgcccgcctgacccgagctcagcgcctgagccaggatgagggcatcaacctttccggtatcgcgcgcattttggtcctcgaagaagagaatcgccaactgcgccgcgaagtcaaacgcatgcaaaccggcgaccaggagagcgttttcgccgcaggccgtgacggcaatatcgtggaggtacaacgctccaaccgcgcccgcctctggcgcaacgccatccgccgcgaaacccgcgaactgcccggccgcgatactgccgccgatatcgctgccggcgccaccggcgactccaactacactcccgccgactccaagtccatggtcctgtggggttggtgagtctggccgcattgcttcgattccttctccattcgtaaaactgtttgttatctcacatcgggcagctgccgaaaagcacgaatcttcttgacggagatgtcaaggtttgttacggtgacgtgcgaaaaccgattcgtaaggggtgctttaggctgagacggtatgtgccgaacccttcgaacctgtgagctaacactcgcgtagggaatgcgacggttgaactcctctgttcggctcggcatcccatatacgcgttgagagagaggaagcgtatgtcaatacgcaaggagctgaccgcccagaacgtactgctgggtttccagcatgtgcttgtttccaacgtctggcttgatccggtgtttgtggccggagcaatcggcttacctattgccctgtcgtcgaatatgattaacgccatcttcatcgtctctggtctggttactttggttcaggccactcggctggttcgcctgccggtggtgcaggggccgtcagccgcgtttgacgcgttgatgatcgcggcaggtacggccggcatgctgggggcggcgagttcgtccattctcatcgcttcgcttgtgttcctgttgctgtgcctgaccggtgtgatagagcggatgcggttcctgttctctccgatgatttcgggcgtggtcatctttatggtcggtgtctcgctgtctggattcacgctgagcgagtttctaggcggggctcccggcgacaagacgttcgccgatccgcacatcctgaccgtgtcgattctgaccacggcgattgtgcttgtcctgtcgttgctcggcaagggcctgctcaagtcgttctcattcctcatcgcgctcgtcgtcggcaccgtggtcgccgcagcgtttggcatggtggacttctctcctgtggcatccaagggatggttgggcctgccgaccttcctgccctacggtccgttcacatttgactggaagatcttcatcccgttcttcattgcctacatggttgccgtcatggaagctctcggcgtctatcaggcggcttctgagattcagggcacgtccctcgaacgcaagcaggtgcgctacggtcttgccggcgaggcggccggttcagccatttcctcgctgattggtggattcaccaccaccgcctacccgcaaaatgtcggcctgctcaacctgaccggcgaaggcaagttgcgcacgcgcacgcctgtgatcatcgccgctgtgctgttgctgattctgggcttcgtgccaaaggcgggcgcgttgctgtccgtcattccctcggcagtcgtcggaggcattttcctgccggctgcggccagcctaatcgtgaccggcctgcgcgccctgcgcaaggtcgctgatgacgagcgccgtcaaacggtcatcggcatgtctctgttgctcggcatcgccctgcccaaggcgctctccggcctgaccggcggcgcaagcgtgttctttggcaacaacatcatggtcggtgtattcagcgccatcattctcaatgcgcttttcgtcgctcttccggatttggtggcgaagcatcgtgcgccggcgtccgtggatgttccagcagccgatccggcggatgggactggcgctgcggcgtacgatgaacgataatgctggttgatattggatattgacaggagcgatgcaatgactgatgtgatggatgacgcgcgtcgtatcaagcgcgggattctggattttatccatacctatggctgtgagcaggccccggaagaggcgtttggtgcgttggcgcgcgacgtgttcatctatcagtacacgtatgatctgccgtaccgtcgttactgcgcggctaaacgcgtcacccccgcaacgctcaaggattggcgggagattccgccgatgccggtggacgggttcaagcaccttgacctttcgaccataccgaccgagcagtgcgaagccgtattcatgacgagcggaaccacgcatggcggcaagatgcgtgggcgcaacttccatcccgatcttgaggtgtgggatgaatcaatgattgtgccgttccgtcatttcatcatgccggatcgagagcgtatccgcatcgccgtgatttcgccggcatgggacatgaaccagaactcctccctgtcgcgctaccttaccaaggccgtggagtgctgcggcagcgaaggcagcggtgtgttcttcgacgagcatggactcaagttcgatgaaatcatcgccttccttaaccgtgcggtgtctgacggtgaaccggtgatgctgatgggtgtctcgtcgtcctatctgtatctgttcgattacctgcatgagcatgatctgacgttcgcgctggcccccgatagccggttgttcgacactggcggcttcaagagcactaagcgcgacatcaccgaagaccagatgcttgatgagctggaacagacactgggggtgccgcgccaccactgcgtcaacatgtatggcatgaccgagttgagctcgcagatctatgaccaaaatattctgtcgtggtatacggatggcaccagcaactatctcaaggcgaaccccgcctgggtgcgcacggtcttcctcgatccggaaacgctgactcccgtcaaggatggtgagaccggtgtgatagcccattacgaccttgccaattggaattcatgcatcggtattctgaccgaggacctcggccatcggaccccggacggattcctgctgcagggcagggcgaagggagccgaggctcgtgggtgctcaatcgcggtagacgaggtcatcagtgccaaccgttgatgaatccgtgagtcaggccattgatgtcttccacctgccctcgggagtggatgtttcggattacgaaatctatgaggtcgccacatcggatggggtgaagcgtttgcgctatccgcgactggatggctcaaaggtgacttcccttgccaagcagcttgtcgatgttcgcaaccgcacgcttgccgcgatgagtgtcaacgatattctcgacatcgtggccgacgcggcccaactatgggccgatccggattttgagctgcggcgtcaggctgaactgctgattcccgcaatcaccggatatgagcctgacatggtgcggattgagctcaaacggtatatgcgccagttcaggcgtcgtgaactgctccggttccttgactccgaaatcggtcagccgtctatgctcgacgaattccggccgaacaaggcggggggatactctaaatatgtgggcccagcgctcacctatcaggtgttctccagcaatgtgccggggattcccgtgtggagcatggcgatgaccctgctggtcaaaggcgcgattcttggcaaatcttcattttccgagccggtgatgcctgcgttctttgctcgcagcattgcgatggtcaattccgacctcgctgatgccattgcggtggttccatggaagggcggctcgcagcagctcgaggattcagccatcgatgcggccgatgccgtgattgtttacggttcttcgcagactaccaaattgattgcgggcaaagtcgccgggtccaagccctgtctaggttacggagcaaaagtcgggttggcgttcattggccaagaggctttgcgtcctgatacctatgccgataccgtgcatcgtgtggctgttgacatcgccacatatgaccagcaaagctgcctggctccgcagaccgtgttcgtggagactgatggagccctcacccctcgtgaagtggctcagctgctcggtggcgagcttgagaatcagcagcgcaaatatccgcgctccgtattgagtgacgccgagaacgtggccattcagcgggcgcgcaccgacgctgagatgagagccttgatgggcgggaaggccgcggtgttcgccagtggccatagcacggcatggtcggtgctgtatcgagaacttgacggtagcggtgccgacgaggatgttgcttcgctgatgtcgccgttgaaccgcaccgtcaacgtggtggcggtgccagatttgttggacgctgccagaagactgacttcctgccgtggctggctgcaaagctgcggtgtcgctgtggattcaaccagactgtttggtcttgcagatacattggccgaggtcggtgtgaatcgcatctgtccgctcggtgagatggatcgggcgaaatccggctggcatcatgatgggggcttcaacctcatcgatctgttgcgcgcggtggatgtcgaacgcggcagcgacgcgtacagcgattcgttcgatatggatatggaataggcctgtgctgttgcgggcagcagaggctggtagcagggcgaaaggcaagggtaatgacagagcaaagcgatatggcacggcgtccaatggtgaatctggatggcagaacagcgatcatcaccggttccggcaagggcataggagcggctgtggcgaaatgcctggcatcgcacggagccgctgtcgtcatcaattacgtacatgacgccgccagcgcgcagcgcaccgttgaagacatccactcgctgggaggcttggctatagctgtacaggcggatgtttgcgatgaatcgcaatcttccaagctagtgggtaccgctgtcgactcattcggcggcgtggacatcttagtgaataatgctttcggacgcttctcctttgacccgcgtcgccgttccacttttgctggaggcgattgggatgagtttagcgcacagatcgagggatgcctgcatggtgcatatctgatgtgctcacatgtggtgccgctgatgcgagcccagacctccgggcgtatcatcaacatctccagcaatctggtcgattcgcccatcgtgccctaccattcgtatatcactgccaaaggcggcttggtcggcatgacccgctctctggcccaggagctgggcggcttcggcattaccgttaatgccattgccgcaggtttgacggccggaaccgcatccagcgcagccaccaccgaggatgttcgtgaacgaatcattgccatgacgcctcttggccgccttgcccgtcccgatgacatcgccggaggggtcgcgttgttggcgtccgacatggccggcttcattaccgggcaatgtctgcacgtcgatggtgggctgaccatgcgctgaggcgcaggggcggtgtgctgacgcgctatggttgtcgcatccgattggtgcaatggaatgcagcaagagtaaaggcgccaattggcgtgcgggcatgtggacggaggtaactatgctgctcaaagccgtgttctgggatttggacggtactctcatcgattctgagccgctctggcatgacggtgagattgagatcgcgcacaacaatggcggcgagtggaacgaggacctcggttgggagtgctccggcactccggtaccacacgtggcagaggtcatgattgcgcatggctgcacattgagcgttcccgaaatcgacaagcagctcaaggattatgtgttcaaggcggaggtcgaacgtctgccgtggattcctggtgtgcaagacgtgctgcattcgctcaaggaagccgacatcccatccatgctggtcactacttcgcctcgccgcatggccgagaacatcatgaagcaggctgatggattgcttgccggctacgtctgcggcgatgatccgtacgagcacaagccgagccctgccccatatctggccgcggctgagagactcggcatcgcgcctgaagacatggtcaagtgcgtggtaatggaagattcctcatccggtctgcgctccggcgccgcctcgggggccacactgattgcgcagactggctggattcgcaccgacacttccggccttggccagtttgcctccatcgactcgtatgagggcatcgatgcggccgcgctggacgcctttgtgcggcagcgtttgggggagtagaaatttcgtttgtattgcggagtttgtgtgggaaaccccagtcgacctgatgttataggccggctggtagggtatttgacggtttgcatataactgtctggttcattgggctggcagctcaatacaagatttaggactcataggaaacacatgggcttcgttaatttcatcatcgaactgctgaaggatccgcgtgccgcgattgccggttggattgccatgggcgtggcgccgaccctcggattcatcttcctcatcgtattcatcgaaacgggcgtggtgttcttcccgttcctgcccggtgattcgctgttgttcgcggccggcgtgttcgcagccccggatgctgcgaccggcaaggccgcgctgccgctgttctggttgctgccggtggtttggtgcgcgccgattatcggcgaccagtgcaactacttcatcggtcatttctttggccgccgtattatccaatccggcaaggtgaaggcgctgactcctgagcgactggccaaaaccgagggcatgattgaaaagtggggcccgctggctgtgttcctgggccgcttcttcccgttcattcgtacgttcatgccgttcatttccggtatttccggtatttccggtatgcgttggagccgtttcacgccgttctcagtgctcggcggcctgtgctggtccacgttgttcacgctgctgggctacttcttcggcaacattccggccgtgcaggatcacttcgaactggtgatcgtgctgattctgctggtttcgctcgccccgaccatcatcggtctgctcaaggccaagttcggcaagaagaagccggccaaggtgaccgatgctcagttggacgtcatggaagacggcatcaagaacctcgataagtaagcaaggaatgtagattaccgcataaggaatcgtcgtgaaaatgaaggccctgactgtgcatatgaggtcagggccttttctgcatgagatgggcgtgaaacaacagcgtggttatccacatttgtcgtggacgacatgccggggtgtggataactcagcaagctagaaccacaatggtcgattcgtgttgagcattgaactcggacacgtttcaatcggcttatgaatagcaacaccacaccccgcgtggcgcgtaggatcacctcgccagcggtagcacctccgggcattccgctgcccacggacgatgcgccgattccagcgcatcgctactacactccgccgcccaggccgttggcctcatgcgaacggcagagatcgggcgaggctccggcactcgccctaactacagacaccagcttccataacattgtgacgatgacgtcaggtcatggaggcgtggggttgagtgtcatggcttccatgcttgcatggacattggcgagacgtgaacacagctgcgctctcatagacgctgatttcgtggccggatgccttgacctgctgctgggtgtagaacgagagccgggtttacgattcagccaagtcgacgcacccctcggccgcatcgagggcgatgcgatgaaccatgagctgatgatgtgggagggtgtgcgagtacttccctatgacccttggagcgcgcgccagcctgactggtgggaagttcaagcggccattcgagccttggcggaaacgaacgacgttgtcatcgtagatgccggtcagggtggactcattgagaccgtacccgatctgcgcagtggcatgcaggtgattgccgcggaattgtcggtgatggggctggccagagccaagtcgcaccggtccagactggattcatggggctgtgaagcgccacatatcgtcggcgtggaaccacgtggcgctccacgtgggagaggccacgtgggtattggtgaggcgcaggactatttgactgccacggtattggggcctgtcaaaccaagtgtcaatctgtgtggagacgtactggaaggcctcggcatcagatcggtgaccaaaggcagccgcaaagccgtgagcttgcttgccgatcttgtcgagcaggccattcgcccggtttcgggagcttcttgcaaggaccggtgatgcggtatggctgccgtaatcactcgggctgatgagcccggcgcagtgcccagaactgtgttcttcggtctattgaatgatgtggcatccgacccgcaggttaccgatctggcggtgacctgtgatggccgcgtttgggcggaccgcggcaacggcatgcgagaaacagtattgcgtgtgccgtttcgctcgccgcaagtagttcgagaatacgccgtccaactgtgcgcgcagcttgggcgcagactggatgatgcctgcccgatagcggacgccgccagtccagacggcatccgcgtgcatgcggtgattgccccattggtgccacaaggtgccgcaatctccatacggttccctgacaggaccatggcatcgttgcgacatctgagccaattaggtgtattcccggctgcttggctgccgatgttcgtgggactggtgcgcagacatgccacagtgctgattaccggcggaacaggcgtgggcaagaccaccttgctcaaggcgctgctggcgcaatgcgatgtgaacgagcgcatcgtcaccgtagaggaagttcgtgaactgggagaactggggcgtggcgatcatgtgtcgttggtaacgcgcgaggcgaatgtggagggcgtcggagccataagtctgacggacttggtcaaagcgacgttgcgaatgcgccccgaccgcgtggtgctgggcgaatgccgtggcgcggaaatcgtcgacctattgcgcgcgttcaattctggtcatcacggtggcatgaccactgtgcatgcggacggcgtgaaccgagtaccgtccaggctgatttcgcttggattactcgccggagtcagtccacaggcgttggccatgctggcggcaggcgctttcgacgcggtggtgcatttggagcgagtgaacggacagcggcgtatcacgcagatcggcgaactgcgtgtagcacatggtgaactggcaggaacaccgctggcggtatggaatggctgccatcctcctcggtatgccgccgaatgggggcacttcattgaacgatggggcatcgttcccgggccgagtggtggtgggtgatgatgtggtgtgctgttctggtggcgctcgccgtgctgatatggccggggaacaagtccgggaggctgtatcggctggcttactgcgggcgtgcggtcgattccgcagccataaacgaacctcgatatgccggctcacctcgcgtgggcgttgcgcaggtgattacgtccgccatcgcgcgattgcgaggtggcggcacattggttgaagcattcgaggaacaatccagcagacgcttcgccactcagcgcattactgtggaacggctcataacggtgttcgaacagcggcgtctgcccgacgaatcaccagcgcaggtacttgaagctgcacgcggggtcaccgccgcagcggttttgagcgatgagctcggttgccaagcagtgccatgtctggaagcggtattgactgcttaccggcagatgaggctgatgcagaacctgcgatcgcaagcatgtgccgttcctaaagccactgtggggctgctgagcgcgcttccggccgtcactgtggcattgggcgagcttctgggagctagaccattggcgttcttgcttggatcgccacgcggtgtggtctgcttggtattagggggatgttgttatgctgccggcttggcatggatgcgggcattgttgaaaggcagcggattatgagtacggtgtgggtacacgccgcggcaggctgtgcggcgatcgctagttggctgtataaggctccgtctcgtcatgacagccgcttgccgggcgaggaaccggccgtagcgcatgattgcgggtcgtcatggaccatactcatattgcgtatgttgcaggtgtccttgcgtcagggctcctcgattccccgggcgcttgacatggtgggcaaagccgtcggcggcgactgcggcgctcgcatgagcgaggtcgggagctccctggccagaggggttccctgggctgatgcgtggcatgccgctatggctgttcagcatgagggtgcgccagctgatagttcatccggaaaacgtaccagcagaacgcaacgagatcttggcctgctgcaatcggctttggaatcgtcatggacgcatggcgatatgcctggcgtgcgcctcgaatccgccattgaacagctggaccgtgacgagcgtgccgccatcgaacggaatgccgcgaagctgtcggtaaagctactgatgcctacagggctatgttttctgccggcattcgtgctggtaggagtcattccggcgattgcgtccttcatgatgtgaatataggcgtgaactgagtgcgcttagggtgaatcttgttgtattgctcggtattgcacttggctgcgtttggttatccacattggtggtggacgacacgtcggggtgtggataactcggcaagctagaaccacataccccgttttccctggtgcatgaagcgttgatagtccacagtggtatgcaccccgcgtcaacccggcgcgggggccaaccactcacacacgcatggggaaggtgcgaagccactgcgcagcttcccctccttaccgaaaggaacgccaatgaatacccctatccccgtcatcgtcgacgggcaggccggcatctttgcgcacagcaaggctcgtgtggccacgctgaacgccaaggcgaaagaacggctatgcctcatggacgcacgcatccgcaccctcatggctgagcccgaagaaggcgcggccactgcggaatacgcagtcgtactcgttgcggctacaggctttgcggcggtgctggtcgccatcctgaagtcggatgccatcaagacgttgctgaccaacatcatcaaacaggctctgaaagtcgggtgacagccatgaagaccatgacatgccggtggcggctcgccagactgccgccagacctatgcacgggatcggccaccgccgaattcgcaatcgtattgcccagcattatcgccatcgccgggctgatattggcaataggacgtgtggtcatcgtttccatggactgtcaaagtgccgcggcagcggctgcacgcgagtttgtggttaccggtgacgaatcatccacgcgcagcatagctgcggacgttgccgggggagagccccacgtcagcattgcccacgacggccaatcgacgagtgtgacggtcgaatgttcggtattgcccggtccgctggatgtaactccaacgcgggttaccggcaacgctacggcgataagccaataacggtcggctggctgggcggccgcaacagaaaggaactgcggtgcagggaatgcgttatgaggagggatcgggcacgatggccggagccatgctggttatggtggtgggcattgcgctcgcggtggcggcaagtgtgggcaacctcatgatctgccagaaccgagcgcgttccctcgccgaccttatcgcctttgacgccgcgtatgcgctgtggcatgcggatatcggtgatccatgtgcgctcgccgccaacatggctgaagcgaatggtgtagttttgggctcctgctccgtgcgggatgaagacgtgttggtaaccatcaaggtggaaaccatggtcctggtggcatcatccgtggagcggatggctcgggccggaccggtgagttgtacggaaggagacaattatcacaataatggaccgtaaagcaccgatactctggcgggcttctgggcctttggctaaggtgagagcatgagcgagagtgaacgcaacgagcgccgtcgcgtggtggccatggtgggcaaccccacttccgataaaggccgtggcgctaaggtggacgcgcaggtattgggtctgctggaggaagccggccgtgcccataacttcgacgtcatcgacatcaccggcacgagtttcgacgattccctgaaccaggcgcgtgaacgcgcgcacgagtacgactatctcgtagtggtcggtggcgacggcatgatcgcacttggagcgaacgccgtgggctgcagtggcaagccgttgggcatcgtggccacggggtcgggcaacgatttcgcacgaggactgaagctgccggtcaaccgtatcgaaaccgcagtggaaggtatcgtcggtgctatcgtgcgcggatcacacatcgatgtggacatgggacgcgtgacctctttggacggcggctatgccgtggatccctccactggcgaggagtacgagtaccaggagagcaagtccgccgagcatccgattgaccggtactatgcgggcatgctgtcctgtggtcttgacgcgagcatcaacgaccgtgcgaatcattcgcatctgccgaccggcaccatgcgctactttgcggcggtgctggtggagctgacgcatatgaagcgttatggttaccacatcaaagccacattggcggacggtaccacggatgaacgagacatcatcacaccattgctgacgattgcgaattcgaggcatatcggtggcggcattgaggtctcgccgtactcctgcttctccgatggattgttggacctggtgtggatggaccacgtgccgaacttcggcgaatgcgcggtggccatttcgaatgcctataacggcaagctacttgcttcaaaggtgttcggctggaaacgtatccgtgaaatcgaagtcacgcgggcagcggaaggcgacgagccaccggtgctgatggcggacggcgaatatatcgggcatttgccatttagggtagtggccgaggactgcgcgttgcgcgtgctagtgccgccggccgtagccgcccgtgaggtggatccccgacaggaagtgctcgacgtcattgcccgagatggtcgcgatcccgtgaccggccagttcgcgtgacccgattatattggctcccctcattaggctgagccgtaaagcaaacagcccagtgggctgtttgtaggcgagggttcgacgatagtcgaaccagaagaaagtcagccgtaggctgtccgcaattgcggacgagctggccgcgaagcggactgaggggagtgcgggagagcggtaccagagccaatgcccgtcagacctcagacgacatagctttcgatatgcagcgtctgcgccatgacctctttgatggttcggtcgctgatgttcggatgcgagcgaatcagcgagataagccccacaatcagtgtgaagaacgtctcatggacgttggtgattggcaggccatgcatctgctcgaaatcacgtacggtggtctgggcaatgtagtcggcaatacggtccgccgcgcggtcaatgaacttgatatacagttcggcgttgccgtcttggatcatacggtttgagaaggggctctcgtcggcgatcagggagcggagcacatgcacgatgtcgtctaatgccttgttcacgttgcctgtttcgcgcgcttggttccactgcttcaacgtggtgaggatttcgtcgatgacgttatcgagtactgcgtcagctacggcttccttgtcttcgaagtagtggtagaacagcgaacgcgtcataccgacttcgcttgcgatgtcggaaacggtgattttggagaagcctttttccagacacaccttgcgcgcggcttgcacgatggcgtcgcgccgggcatcgccgcgggtggggcgtttctcgtcgaggatatcgctcatgggtgcctcctgaccacaaccgttattgacactatgttaatacaaagaaagcggttaataacaataaaaatgcggtaaccgttgtcaggtgaatgtcgttggaatataaagagttttcccgattcggcaactatgagcccggtttatcttgactttttatcggttaattctgagggcaaaggtaggttagtagctatggcacttgcactgtatcgtcgctatcgtccggacaccttcgaaggggtcatcggccaggaccaagtcacggtcccgctgatgcgcgccttggacgagggcaagctcacacatgcctatctgttctcagggccgcgaggctgcggcaaaaccagctccgcgcgtatcctggcccgttgcgtcaactgtgccaaagggccgacttcccacccctgcggcgaatgcgaaagctgcaaggacctggccaccggcggtccgggttccatcgacgtggtcgaaatcgatgcggcctcgcacaacggtgtggatgatgctcgagaattgcgagaacgcgctggtttcgcccctgcgcgcgaccgctataagattttcattctcgatgaggcccacatggtcacgcagcagggcttcaatgcgctgcttaaaatcgttgaagagccgcctgaacatgtgatgttcatcttcgccaccaccgaaccagacaaggtgatcggcaccatccgttcgcgcacccaccactatccgttccgtctggtgccgcaggaagtcatgggtccctacctggagacgatctgcgacaaggaaggcatcaagcccgagcccggtgtgctgaaactggcgatgcgcgccggtggcggctccatgcgagataccctgtccgtgcttgaccagctgatggttggttcggtcgaaggcgttatcacccatgatgccgctgtagccctgctcggcttcacgccggaggcactgatcggtgaggccgtggatgcggtaatcgatcacaacggcgaagccctgtacggcgttatccagaaagtcgtggtcggcggattcgatccgagacgattcgtcgaagacctactggctcgtgtgcgtgatctgctggtgcttacgttggccggggaccgtgcggaatccgtgctgtccgacacggctgaggccgaggatatggacgatctgcaccgccaagccaaggcgctgggactgggcgcactgaccgcaatggcagacatcatcaacactacgttgggtgccatgaccggagccatttctccgcgtatgcgcttggaactgctggccgcgcgattgttggccggcagtgaatcaggctttgcaacagccgctcccgcgccagcttcttctggtatgccgcctgcggctgcttcttcgacttcgactacgccagccgcttccggtatgggtgccagtggttttgccggcgcatcgcgaggcgggtttgccggagcctcacatggcggattctccggtgctgcacgcaaccagcaagcagccgcgcctcagagcaccgcttcccatgaatctgttggaggcaatggccctgtcaacggcccggtcagcgaccgacccgcgggctctctgtctgtgcaacctgctgtagcaactgctgctgccggtgccgctcctgccgccaatgccgggtggggcgcgcccgccgcgtcgccggccgtcccggctcaaccggtgacctcgcctgcggcatcggataatcggtccatcgacgagaagtgggatgcagccgtcgccgctttgccggaaaccattcgtgaatatgtgtcacgagacaaggtgccgaccgtaaaattcggccccaaccgtaagggtctgccttgcttgtcgatgacgttcgacaagtcgctgagccagcacgctttcgccttggccgtggataacagcggtaagaaggcggcggccgtggtgatggatgccgtgcgcaacgagttcggcgccaatgcggttattgcaccttctgcggtcgcggcgaatggcgagcgagtcgaatccgtcaaacgtatgagcccggagcaattggccaaggtcaagcagcagattgccatggccaaggctggattggccgcgtcgagtttgggcgcgagcctgggcattcatatggggagcgagacgaaagctccgaagccgactgcaacaggccaagccgaggacgcagacgacagccatcgagccggacaatccagtgcatccacggcagcgaagaactggagtgacgatgacccttgggccaagccggccgtaagcaacgcttcgccgcaatctgcagacgggttcgcgcctaacgagcccgctgctacgcctgcgcccgaagagcatcacaagaagcatgttgcggttccggacatcagtgacggtgttgatccgtgggccgctccggctgctcctgttgcacccactgcgtccgttgcgtccgctggacccactggacagtccactgggcagccagccaccgcatcttccgttacggcagttgccggcgcgagcgacgatccatggaatcagacgcagtctcaggccgcggtctcaccggcgtcgcaaccggccgaagccgacccgtggaaccagccatatcagcagtctcctcacgatgatccgtggaatcaaccgcaggggaaccatgctcaggcggctccgcagccaggagacgacccgtggaatcagcctcagtcccagactccggcttcttcggttcctcagacagtgtcgggcaatatgtcgggcgatgacccgtggaaccagccccaatcggttccgcagccggctgccggcgatgacccgtggaatcaaccgcaggcagttccacaatcggctccgcaggccaccccgcacggtgacccgtggaatcaaccgcaacccgcacagccgaccccgaatgccgacccgtggaatagccagccccagccccagccgaaaccacaaccgcaagtcgcggccgaggatgacgaatactcgatgagcgaccagtcgctcggcgaggcgacggccatgaatctcgacgatctgaaaaagctattcgaggtcaaaaaagtcgagcaattcgcggcagatgatccgaagaaccccaagaacatccagcctgccaagaagcactcggatgaataatgaggacgaataacgaggaatacccatggcacttgcttatgacggcgcaatacaacgactgatcgacgctttcgggcggctgcccggcatcgggccgaagggcgcgcagcgtatcgccttctacatgctgtccgcgcccgaagatgaagcgcgcgatttggccgaggccatcgaagaggtcaaggccaagatccgcttctgtgatatttgcggcaacgtgtgcgaatccagcccctgcccggtatgcgccgacccgagacgcgaccgttcggtgatctgcgtggtcgaagagcccaaggatgtgatgagcatcgagcgcacgcgcgaataccacggcctataccatgtgctcggcggcgcaatcaacccaatggccaacgttggccctgccgacctgcgtattcccggtctgctcaaacgcttagaaggcgatgaggtcaaggaagtgattatggcgctcgacccgaatattgaaggcgaggccaccaccagctacttgacccagctattgcgacccgtaggtgtcaaggtcacccgacttgccagcggcctgccggtgggctccgacttggagtatgccgacgaaatcacgctgggcagggcactggccggtcggcgcgaggcctaagccagcgtatcattggcgctttcgcccttgcggcgcatccacggccagaatgcgccgtggcggatgatgcgcgcggccttgtggcgtcgtgccaaccagataatgaacagtcctgccgccagtatgcctagaccaacaccaagggcgatattgcgcgcgtcaagcacgtcattcggctcgggggccggcatcggaatcgccacgcggtgcccggagataagcagtcggtgcgtgttcacgccgtatggcgtacaggtcatcaaagtgacgcgatcctcacccggcacgatcttgagcttcgacgtgtcatccggcaaaatcaccgaaatgcggtccactttgtagcccaaagtttcgcccatgacttcgatgtagaagaagtcgccctctttcacctcgtccaaacgggtgaacatcagcgcttcaaccaacccgcggtgcccggtaatgaccgaatgggtggatttacctcccaccggcagcgacgtgccgtacaagtggccggcaccagaagccagtgcttcctcggaagtgccgtgataaaacggcagattgatggactgcttgggcaccttgattgtgcccatcacgccgttgccggtattaagcagtgactggtattccttgtctttctttgaggcggaatcctcgccgctggcttgggatcctccttgagcggcggcgaacggatcgacggcttcacccaagataggctggccggattcagcgagcttcttgttgtatgcgcgggccgccgtgagcttgtcttccgcctgcgggtaaggccagccagctacttctttggccgtggtggctgtggtggcggccaagttgcggtcggactcgaattgcaacgctagcgggaagcaggccacggcgattgcggcgatcagcagcacaatggtgatgatgcgcatcgcccacaggttgcgttgcaggcgtcggcgctcggccacgagatcgctgatatcgatgacttcgtcaaatggtgttggaacgaatgctgcgggctcgggccgcgctgaggaaacgttgtcatttgcagatgcgtcatccggcatggccgcgttgttttcccacattttctgtgaggcacgcttactcgtcgaacgtcgatgcagcaatgccatagtcgcctgttccttcgcttgatctgctcatgatttgcttatacaagacggccgggtccgtcttagtcgtgcatggcataggtgctgtcgcaaatggcaacaccgcacgcgccacactgcgaaacgttactccgcaccaagcctttcatgcaacatgccgacggggccatataggggcaatgtagggggcataagaagtctgaaaatgcgatacgaacaacgttgctgcggctgtcagtgatgcggcttacttcggacaagccgttgagatgcaaggggatgcaaaggattgcaaagtatggcaacatgataagtcgcagcgtcggcgatatttggcagagctttcaaataggggggtatgaatgcataaagagggaatatgttacctcgataaaagaggcgctattgctgttttcgtggatgtcggttcgtcgtcgagccgttggtttcgtaggcgtgaggggcgttcccgcgtattctgttttccgaccaaagaaatgaatcacgaagaacgcctgagcaaaagctcattcgccggattgccgaacgtcaaaggcgcggttgcagaggatgcgcggatcacggattcgccgctgcgttccgaattggctagtgtgatcagagaaaagatggcactgtctgggcatctctctttttaggtcaaggaaaagggtctggcgataggcggtgatgacgcccatcgtgttggtggcactgttgctgcaaaaaggaaaagtctagttcgtaatctagtgtccaacttccctaataggaatggtccaacttccacaacgaaaatagtccaacttccacaattagaatggtccaacttccgcaatagagtgatttataggttgatgtttcgacggtttgcgggagggcacatatggcagtggagagctcggagattcaacgtggcgagtaccttcctcgagtggctgatgggttgctgactcaggcattgcagtcttctggtgccgttcagattaaaggtccaaaatggtgtggcaagactgcaacggcagaaaggcagtcggcgagtcaggtcttcatgcaggacccggatcgcagtgctacgctgttggccttggctgatacaaagccttctctcatcctgcgaggtgaggagccgagactcattgatgaatggcagatggccccgcaattgtgggacgcggtgcgtttcgccatcgatcgagggcgcggtcgtggccgattcatcctaactggatcggcgactcctcaacaggaaccagctcattccggagtgggaagaattgcccgattaaccatgcgtaccatgtccttatttgaatcgcaggaatcgacgggcgttgtttcgttgggagagttgttcgatggcaaccatgatgtttcgggtttctccgatttcgatattgaaaacaccgcgtttgcgctatgccgcggtggctggcctgaagcagtagtcgaatctcgagtaaatgttgccttgcgcatggccgcggattatgtcgaagaactacttgattctgacatcaatcgtatggatggtataaagcgcaataaaacttggatgcgtctgattatgcgctcgtatgcgcgcaatatttcttctcaggcgtcgcaatccactatcgcggcggatatgcagggtgaaccgccttcggaaggtacactctccgattatttagatgcattgtcgcgagcttgcgtaactgaagatcttccagcttggaaccctcgtttacgttctaagactgcagtgagaacgagcccaaccagacacttcagcgacccgtcgatagcttgtgcggtactgcacgcgaccccggagaaactccttaatgatttcgagacctttggcttgctgtttgagtccatgtgtattcgcgatctgcgtgtgtatgctgatgcgcttggcggagatgtgttccattatcgggataagacgggattggaatctgatgcggtcattggcctgcatgatggacgatgggctctcattgaggtcaagctcggagaaaagcaggttgatattgcggcggcccatttgaaaaagttggctgacagaattgatcaagatcacgaaggccgtccgtcattcttgatggtgctgaccgctacggctgccgcttatcgccgggatgatggggtattggtagtgccgttggccacgcttgctccgtgagctcgtatcgtgcgtttgacccatcgttcccaacacaaaaggaaaaggcccgggctgcgggaccgggccttgaaaaggagagaggaagaagaaggtattcagttatggggtctgcggaaacctcgccggtttgctttcgtttgccggtaattgatagttaaccgctcgaatctcaaaggatggatgcggctgcctcaaagaaccaccggtgaaaacttgaatatttgctgaacaacgtaggccatgcccgtgtccacatgtcggcgcggggtcgcggggtgaacgcggcaacctttataatcgttgcgtttgcgtagaatattgagcaaactccccctaagagaagaacaaaggacagcagtggctctcatcgtgcagaagtacggcggttcgtcggtcgccgataccgaatcgatcaaacgtgtggccaagcgcgttgttgagacggaaaagaagggcaacaaggtggccgtggtggtctccgccatgggcgacaccaccgatgaccttatcgatcaggcgctgagcatcgactccaacccgcccgagcgcgagatggacatgctgatgaccgcaggcgagcgaatttccatgagcctgctggccatggccattcacgccgaaggcagccgtgcccactccttcaccggtcagcaggccggcttcttcaccgacgcccgttacggcgcggcccacatcaaggccgtgagaccggaccgcgtgaagaacgcgctctcattgggagacatcgccatcgttgccggcttccagggcatcaacgccaagggtgacgccaccacgctcggccgcggtggttcggatacctccgcagtggcgcttgccgtggcgctcggtgccgatatctgcgagatctacactgacgtggacggcatcttcactgccgacccgcgtatcgtgccttccgcccgccgcattccgtccatcgattacgagtccattctggagatggcgtcctgcggctccaaggtgctggcactgcgctgtgtggagtacgctcagcgtttcaacatgccgctgcacgtgcgttcctcgttctcccgtcgccccggcacattggtggtgcccgacggcattgacccgcgtacgctgccgaacctcgactgagcgcggctacagcgaacgataatcgtaagtaatttcaagcaagacaaggcaagacatgactgaagaagaagcgaaatccatgggcgacctgttccctgacctgggccccgaggcaccggtgatttccggcattgcccacgatcgttccgaggcgctggccaccgtgcgtggcgtgccgaacgagccgggtatggccgccaaggtgttcaccgagctggccaccgccggcgtgaacgtggacatgatcgtgcaggccggcgcatccgtcggcactgcggacatctccttcaccgtgcccgaatcggccgtcaagcaggttcagaacacactgctcgacaagcaggaagtgctgggctaccactccttcgatgtggacaccaacgtgggcaaggtggccgtggtgggcgttggcatgaagacccatgccggtctggccgccaagttcttccaggccctgagcgatgagggcatcaacgtgctgatgatttctacctccgagattcgtatcgccgcgctcgtgccgctcgatcagctcaacgacgccgtcaaggcgctgcacaccgcatacggtctcgatgccgatcaaatcgaagccgtggtgtacggcggtactggccgctgagccactgagccgcgtttttgcggtatatacgacgaaagccctccttgcggagggctttctcagtttcggactcagtttcaactacttcttggtgatgtagccgagagccttgagcatttcggcgcattcaagggcaccgccggctgcaccacgcagggtgttgtgggccagacccacgaacttccaatcgaagatggaatcctcacgcagacggccgatggaaacgcccatgccaccctcgtagtccacgtcgagcttgacctgcgggcggtcatcctcggtgaggtactggatgaagtgcttcggtgcgtgcggcagctccagctcggaagccttggacgtgtagttcaccagacggtcgatgagctcttccttggtggccttcttgccgaagttcaggaacacggtggcggtgtggccgttgagcacgggcacgcggatgcactgggaagtgatcttgaggtcgccgtcgaacggcacgatctcgcccttggcggcgtccacatggccgaacaccttgagcggttccttctcagactttgcttcctcaccggagatgaacgggatgatgttgcccaccatctcgggccagtccttgaaggtcttgcccgcgccggaaatcgcctggtaggtgctcacaaccacctcgcgcggctcgaattccttccacgcggccagcgccggcgtgtaggcctgaatcgagcagttcggcttgacggcgataaaaccacgagtggtgcccaggcgcttgcgctggtgctcgatcacctcgaagtgctccgggttgatctccggcaccaccatcggcacgtccggggtccagcggtgggcgctgttgttggagaccaccggggtctcggtcttggcataacgctcttcaatggcgcgaatctggtccttcggcatgtttaccgcagagaacatgaaatcaacgccagaggccacggactcggcatcgtcgccatcgacgaccaccatgttcttgacatattcgggcatcggggtttccatcttccaacggtcgccgacagcctcggcatacgtcttgccggcgctgtgcgcggaagcggcaagcgtgaccacctcgaaccacgggtgattctcaagcagcgtgataaaacgctgaccgaccataccggtggcaccaaggatgccgaccttcaatttttcggacatgatgacctctatgacctctgggtttcgatggattacttacgtcggacggccgtcatgcgggtggccgtaaaacaatgcaattgtacgaaacacgcggaacaacggcagtggtcttcccagatggtggctgcccaatgaagcgaaggcgatgttctacactggtagccatgtctatcgcatcagtagaggcccaaaaacagctcgaccgtatcgtggctctcggctacccggatgtggcggatatttccgccgccgcattccgctcgctggcccgacctctgatcggggcgctcgagcattccgatttgggatcgaacatcctgctggtgcccacgcgtgaactggtttcgcctgagtcgctgattgcacgaacctccatcaatcgcatggcaggcttcaccaccatgccgccgcgtgacatcgccagcttcctgcctcaagacggcttcatgccgccggaaggcccgttctatctggtcgtcaatccgcacaccggcacgtgctatgtcaatcgcgagccggatgtggcccgcaaacttattgactccgatgagcgcctgccgctcaccctcgaggaaggcttggccatcgccacccagcacccggagtggctgctggaaaagaacggcttcaatctgctcggctcacgctccgcagacggacgcgtgccgagcatctggatgagccagaacgcaccgcgactgggagccgtctggcccaattcccgccatacttggctgggcaacgcgtattgcacggcccgtcgcggggtgagtctgttccgttaaagcgattctcctcaaaagacaaggtcggcaaggtggatggcgaccgcccgttgtcggcgcatggggaaccgtaatgaaagtcaataaggatggcaccttctccggctcctaccacgactcggatatgggagccacgggagacggctatctcataggaaacgacgtcgatacgctgaacggcaaagcattgctcaacgtgacgagcggagcggataagggatacacgttctacgatttctcgtagtgattcagctgccgtgcggagcggcggggaacgtgaaggaccggcgcgtatgctgtgcgaaacagcattacgtccctagactggtgaggcatgacgaacctgcgattccgcgaagacggcagcttccgcgtgctgcagatggccgacatccaagacggccccaacgtactccccgataccatccgccttatccgtgaggccattcgcaaagccgacccggatctggtggtgttcaccggcgaccagattcgcggttacgatcctgcctacatcgacactttcctgcgccgccgtggcgaggaaccgggcgctcgcgtgcgtgcggtcaccgaactcgaggccaagctgcgcggaatcaagcggcgggccagaaaccgcgtgaacaatcgtctgctggccatgaagtctgacggcagcaatcccgacgtccaacaaaccgcgtccaccgcgtccaccacgtccacgctggtctactccacaacatccgatccacaggatgtgccgacgactttggacgagctcatggacgagacccgtgacaaagtccgccgcacgtttgccggcttccttggcccggtcatcgaagcggaagtgccgttcgccgccacctacggcaatcacgatttccagtgcggcatcctggccgacgagcaggacggcatctaccgcgaattccccggctgcctgaacccggtcgacagcctcgagccaggcacttttgccctgcccattgaggcttccgacggatccgggcgcgtagctatgtccgtcatgatggtgaattccggcgattacgccggcaagcctgaagagaacgacgcccaatacccggcctatgtggtcaatccgcgcggtcttgatttggctgattccgatgggtatggcacgccaagccccgaggcgatcgattggctgggagccgtacagtccgaacttggcgaacgcaacggcgacggtaagccggtgcctgccatcgccttccagcacattccgccgcaagaattctacgattgcctcaaagaggttcccgcatggacgccgaacgcggtggaaggcgcgcgtacccacgccggccattgctacgtgctcaaccatgagatttgccggccgggatcgcggttgggtgaggcgattggctgtgcggacgagaacgtcggtgaagtggacgccttgcgtgaggcaggcggctacttcgcgctgttctgcggtcacgatcacaagaacgccttcgtgggccacgcgcatggcattgatttgggctacgcgcccacctgcggattcgaatgctatggtcccaagtcgcgctatcgcggcatccgcctgttcgaattccatgaaagcaacccggccggctacgtgacccgcatgctcacctggggtgatctggtgggccgatactccagcaacgaggtgcgcgtctggttcgaggaccactgcgtgaccggtgccatcagcatgcgtaacgaattgcgccgcccgcaggtattcgcagtgctgtccggtgccatgagcctcggttttatggccgtcatccgctcgttggtgaagaagcggtgacgaccataaaaccggtcaatacatcaattctgctgatacggcctgaatgcggaataggtggcatcctcgtcgtatagcaggttatcgggctcttccgattttggcgtgtaagggcatgtgtcagaggtgggtttggatggcgtgtctgaagccgccggcgtgcagcaggcttctggtgatgtagttgtcgaggtttgcggaatcccagggctatgcccctgagggtctcgagccttccgttgatggcctcggtgggcccgttcgcgctgtgctcccagtcgaagaacgcgaggacgtcgcccatgcgcccccacgcatagctgtaagtagtagtgctgcgtcggaacgctaagtgtgctggcgtattgtgagatgaacgggatgttggaatgggccgtcgctaggatagaggaagttatgcatgttaccaatgcgtaaacgaatatccaataagcgattgtatgaatggttcacacagtaaaggaggaacaatgggtcaggatcaatcatctgtttttgatctcgcagcggtagccgcagcgtccaatggggggaacaacgacccgctgctgcctccggcgcgattcattggcgatccgcagaagccgagtcgtatgccgtacaacaagtacgccgcctacgacaagcagatcccgtttgattacccggagcgtacgtggccgggcaagcgactgcagcgcgcgccgcgctggtgctccgtcgatcttcgcgacggcaatcaggccctcgtcaacccgatggattccgagcgcaagctgcgtttctggaacctgctcgtctccatgggattcaaggagatcgaggtgggcttcccgtccgcttccgagaccgatttcgacttcatccgtatgctcatcgagcgtgagctgattccggacgacgtgaccatcgtggtactcacccagtgccgcgagcacctcatccgccgcacttacgaggcgctcaagggtgccaagcgcgccatcgtgcacttctacaactccgtgtctgtgttgcagcgcgaggtcgtgttccgcaagaacaaggaggagatcaagaagctcgccaccgacgccgccgaactgtgcaaggacctcgagaacgaggccaagggcatcgacttgtactacgagtactcgccggaatccttcaccggcaccgagccggagtacgccgtcgaggtgtgcaacgccgtgatcggtgttatcaagccgactcccgagcacccgatgatcatcaacctgcccgccaccgtggaaatgaccacgccgaacgtgttcgccgacgaagtggagtacgtctccacccacctcgacgaccgtgactccgtggtgctctccctccacccgcacaacgacgaaggcatgggcgtggccgccaccgagctggccgtgctggccggcgccgaccgcgtggaaggctgcctgctgggcaacggcgagcgtaccggcaacgtcgacttggtcacgctgggcctcaactggctcacccaaggcatcgacccgcagcttgacctgtccaacgtgcccgagattcgcaagacggttgagtactgcaaccagatcaagatttccgagcgtcacccgtacgccggcaacttcgtgttcactgcgttctccggctcgcatcaggacgccatcaagaagggtctcgaggctcgtcaggtggccgccgagcgtgctggcgccgatctcgacagcttcgtgtggcttgtgccgtacctgccgatcgacccgaaggacatcggccgtacgtacgaagccatcattcgcgtcaactcgcagtccggcaagggcggcatggcctacctgctcaagaccaaccacaatcttgacctgcccaagcgtctgcagatcgaattcgacaagatcgtgcagaactacgctgacacgaccaagaaggaagtcaaggacgaggatatctggcgtctgttcaaggacgagtacctgccggtcgaacagtccggcatgaccgccgccggtgtggttgtgggcgatactcatgacgcctcgctcgtgccgtggggccgcttgaagctgctcaaggtggccgtcagctccggtgaggatggctccgacaccgtgctcaaggctcgtctgctcgaccgcggcgtgaacgtcggggtcgatgcgcccgtggagcgcgaggtctccggcatcggcaacggtccgatcgccgctttcctcaacgccatttccaactttggcgttgacgcctcgattatggattacgcggagcacaccatgtccgtcggcaccgacgccatggccgcctcgtacgtggaatgccaggtcggcgaggccgatgacgcgcagatcgtgtggggcgtcggcatcgattcgtcgattaccactagcgccctgaagtcgattatctccgccatcaaccgttcccagcgcaagcgctgagcgctaacagaacaaaaacaaggctccctctgattgcatcagagggagccttgttgtctgtgttttacttactactgagtgacgccgttggtgccggtgttcccgccggtgcctccggaattaccattatcgttgccggtattgttcccgttgccaccgccggtattgttgccggcgttgccatctccgccggtagtggtgccgggataattcgggcactcggtggaatagctcggattggcgaggcactgctgggcgaactcctgagcctgctgttgcttcttggcttcctcttcggccgccttctgctgtgcgtcctgctcagcctgcttctgcgcgtcttcggtggactgcttgttggtgttgttggacaggccgttgctctgtcccttgcccaagccccaagtgccgtcggagccgccgatcttgccgttgtctttagcggtcgggaactgctccgcctcggtgccttgcaaggcctgagccatgaactcctggaacaggtgggcggggtatccagtggaagagacgccgtatccggagaaggctggcaccacttgcggattgcccttatcgtccggattccagatagcccacacattcatcatgctgggggtgtaccccacgaacgacgaagccatttcgtcgttggcggtaccggacttgccggcgacgggccggcccaacatgctggatgtgccggccgccgtaccgtacgtggtggtgccctgcatggccttctgtaccaaagcgcagtcgttggcatcgaacaccttggtgccgttgctgggcgcgttgtacatgtccttattgttggaatcaagcactttggacaccatgtgcaaggtgttcttcacgccattgttggcgatggtcgaatggccttgcgccaaatcccacacggtcagggcgttgatgcccagcacgttgtacatggagttttcatcgatatcgccctgaatgcccgcttcatgggcgattgcggccgtgcgcttcggcgtcagatgctcattgacgttcatgaacaccgtgttcaccgagttggcggtggcctgatacagattgatgttgccccagttgttctccagagcgttgttcacctcttgatccaagccggtgaagtgctggtgggaattgccgttgaacaacgtatcgaagctgacgccggattgcgcggcccccagcaaagcgaacggcttcatagtcgaacccggttcgaatacggcctgatcggcattgttgagctgcttggacagataatctgaaccggcgtatacggacaatacttcaccggtcttcgggtccagcgctatgccgccgatttgcagggattcaggcatgtcgtccagacgggtgtcgccgatggactgcataagatcctgcttgctcttgtcgatggtggtgatgatcttgtatccgccagtatccaaatcctctttggtaaaggccttggactgcaccagctcgcggcgcaccatatccagcagataaccgttcggccccgcgtattcgttctgctgcgccaccgcggcggtctgcgggaacttggcatcagtgtgctgcttggcagtgatgtaaccatcctcctgcatgatgttcagcacacgcttgaagcgcgatttggccatatcggcgttatcggccggatcccacgtggacggtgacggaataatgccggcgatcatcgccgcctcagacagcgtcagatccttggcgtccttattgaagtatgccttggccgctgcctggataccgtaggagttgcggcccagatagatggtgttcatgtaattgcacagcacctcgtccttggattcggtctgcgcgattttgatggccatgatggcctcgcgcgccttgcccacataggatgtggtttcgcccatgtaataccgctcggcatactgctgagtgatggtggaaccaccttggcgcgtgcccttggtcacattattaatgaatgcgcgggcgatgcccttcagatcaaggcctttatccgtgtagaacgtacggttttcggacgccacaatcgcgttgccgatgtagtccggcagcccctcgcaagagatgatttcacgattctgctccgcgtaggagccgatcgcggtggtgccgtccgcgtaatacacggtggttttctcggccaacgcgaacttctcgggttgcgggacctcggtggtggtgtacaggtatgcgaatactgcgataccggccagcaagcccagtccaatcagggagaagaagatgcccagcacccatttcagtacacggtgcttgccttttcctgtgttctttttcttcctgttcggggctcgatggctattggaagccttgtggcttgcgtggcgggaacggctctcctggggcgtataggggccctcctgtgcggagtggtcggctctgctttgcgcggtgcgcggttgcctcagagcggggccattgcctcccgaatgtgcacgacgagtataagaagccatggtgtccaccgtaactgttggccttgaacaatcgtttgacgtgagcgtaaccacacgcatttatgccggtatttttccggaattcttacaattgggcacgttccttgatgctgcatgaatattgcctgaatgcgctggttggcctgccgtgcgacccggcgcgcatgtttcgtgtcgctgcgctggtccatacgtctccatagacttatccccagcctccacgcggcgctatgtcacccaactcccccagggcaggaatgcagcaagggtaagtggcctctgacgggtgcgtggaggttttccatttgtgcggatttggccgtgagctggcacgagcacggctccctgtccggggcgcggccgtacagtcgaacgtatgaatgacgcacagacccctagaattcgcgacccgcatgcggcggtcaatctggtcggctcaggcgcagcgcagcctgactcgtcgtcgaacgttgttgacccattggctgcgctcggcccggtctccggttcagatgcatcggcatccacatcaggctccttaggggatttcaggccgctgggcatggacgatgcggatggggcatctgatatcgaccgtggcttggcccggcttgacccgcttaccgtgcgcccgcgaatctccagccgcgtactgtgcgtggtattcggtctgctcctgatcgctattggcttcggcgtgtggtgggggtgcgtgtttaccgaaaacggacaatcgtacgacgaactggtctggaaaaacctgcacaacgatgtaccgtcctggaccaccggcatgatgaacgccgtcgcacaatcctggctggttatcgctgtcagctgcacaattgccgcaatcggcattattacggcgctgattcgacgccgctggtggttggccgggcaaatcgccgtgttcgccgtggtctgcttggccgtcacccgtatcaagggtctgttgccgcgtccgttcatcatcaacactgaatcgcctgccgctaattccgcgccttccggacacacgatgctggccgcagcctgtgcggtgattctgctgcttaccgtgcctcgcgcggttcgagctttggcgggcgtcatcggcgtggtttgggcggcgaccgtcggtgtctctgtgatatacgggcaatggcatcgcccttcggatgtggcgatgtccatcctgctggtggcgggattggccctgctcgctctggcggttacacgcaagtccggcatggacgagccgggccaccgcgtctcctcagtgagtgtgcagatcgtcggcagcgtgttgattaccgggggcctgctgttgctcgcctacagcggttatgtgatctggcaggtggtgccgggactcaatgtcagcgccagttgggcggttcagggggcgaatgtcagcgctgttgtgggcattacgggtgtggccatgctcgcattcggactgttgctggccctacgtcagatcactgcagcgcccttaagcaggctgggcctgatcggcgctccgccggcaccgcccaaacggtaaaacatgaggtgcgaacggccgaatttgcccggcacaacggcggaatttggcagttggatatgattcatgagtattatgacgccagaaacgtcgtgtgtttcgcgcaatacataaggagtgggtatggctaccaaactggtgattgtggagtctccgaccaaggcccacaagatcggtgactacctgggcaaggggtacaccgtcatggcgtcggtcggtcatatccgcgacctcgcgcagcccagccaggtgcccgcggcagacaaggccaagttcggcaagttcggcgtggacgtcaacgacgggttcaagccgtattacatcgtcgacggcgacaagaagcgtacggtcagcgaactcaaatcggccctgaagaacgccgacgaactctatctggcgactgatgaggatcgcgagggcgaggccatcgcgtggcacttggtgcagaccttgaaacccaaggtgccggtcaagcgcatggtgttccacgagatcaccaagaacgccatcaacgcctccctgaacaacacgcgcgacgtggacggcaatatggtcgacgcacaggagacccgccgcatcctcgaccgtctgtacggctatgagctgtcgccggtgctgtggcgcaaggtgggtccgggcctgtccgccggccgcgtgcagtccgtggccacccgcctgatcgtggaacgcgaacgcgaacgcatggcattcaagcgtgtgccgtactgggatatcgtcgccatgttggccgcgcctgacgcgctgggggagcgtgccgaattctccgcccgcatgatcgcgctcggcggcaagcgactcgccggctccaaggatttcggtgccgacggccagctgaccccggacgggttcgcggcgaacgttcgccagcttgatgaggctggtgccaccgccgtggcttcggcgctgaagaccgccgatttcactgtgatgtcgatggaaaccaagccgtaccgccgccgcccgcagccgccgttcaccacctcgaccctgcagcagaccgccggcaatcgcctcggcatgggtgctcgcgccgtgatgcgcgcggcccaaagcctgtacgagaacggctacatcacctatatgcgaaccgattcggtgacgctgtcgcaggagggcatcaccgccgcccgcaacgccgtctcctaccatttcggcgacaagttcctctccgccgagcccaagcagtacgccaccaaaaccgctggcgcgcaggaagcccacgagtgtattcgcccggcgggctcgcgcttccacgacccggacgagctggcttccaaacttcccggcgaccagctgcgcctatacacgctgatctggcagcgcacgcttgcctgccagatggctgatgccaccggttccaccgccaccgtgcgcctgtctgcgccggccggccccaccgagggcgaggccgtgttccaggcgtccggcaccgtcatcgaattccccggctttatgaaggccacgggggaggggcgcaagcccaaggccgccgctcccggcgctggggctggctcggaccaggctgctgccgccggcaagacggacgccaaggccgtcaggggtgacgcctccgaatccaacacctccctgccgccgatgagcgtcggccagcaggtcgaggcaagcgacatcgaaccggacggccatgaaacccagccgccggcccgctacaccgaggccacgctggtcaagacgctggaagccaaggagatcggtcgcccgtccacttacgcgagcattatttccacaatcatggatcgcggttacgtatacgagcgtggccgtgcgctgatccccagctggctcgccttctccgtgaccaagttgctcgagacgaacttccccaagctggtcgactaccagttcaccgccgagatggaaaacggccttgaccgcatcgcccacggcgaggaatccggccgcgactggctcacccacttctacttcggttccggcgagggcgccgcccgcaacgccgacgaggcgcacgaaggcctgcaacagcaggtcgcgcagctcggcgagatcgacgcgcgcgccatcaacaccatcgacatcggcgacggcctgcacgtgcgcgtcggccgttacggcccgtatctggaagacatggagcatctggacgccgaaggcaacccgaagcgcgcgtctctgccggacaccatcgcgccggatgagctgacggtggccgtggcccgcgatttgatcgacaaccactccggtggaccgcgcgagctgggcgttgatccggtatccggcggtaccgtcgaggtgcgcaatgggcgtttcggcccgtatgtggcgttggtgccgccggctgaggcttcggctggcgctgctggcgatactgctggtgcttctgcggccaagaagggttcgaagaaggccgcggccgccgccgcgtcgcgcccgaagatggcctcgttgttcaagacgatgagccctgaatcgctgtcgctggaagacgcgctaaagctgctgagcctgccgcgcgaagtgggcacatacgaggaaaccaacgccgaaaccggcgaggtatccgaatgcacggtggccgccaacaacggtcgctacggcccctacctgaccaagacgggtgccgacggcaagtcggagacccgctcgctggcctcggaagacgagatcttcacggtcgatatcgacaaggccaaagaactgttctcgcagcccaagtacggccgcgggcgtggccgtggtgccgccaagccgccgctgcgtgatttgggcaaggacccgaacaccggcaagaacgtgaccatcaaggacggccgtttcggcgcgtacatcaccgatggcgagaccaaccgcacggtgccgcgtcagtacacgcctgaatccatcacccctgatgacgccttccgactgctcgccgaaaagcgtgcggctggtccctccacccgtggccgtcgcggtgctgggcgtgctggtggcgccaaggccgttgccggcaagggcaagaagggcggtacctcggctgcggtttcggcgcaggaggccaagcgcgccgaacgccgtgccgaagtcaagaagttggcgaacaagggctggtccaaccagcgcatcgccgaaaaactcggttccacccccgccactgtgaaaaaggacgtcgactggctgaccgccaacgagggctacgagcgccccgccgtaattcccaagcgtggctgagcggaattattgctctacttgcgtttcaaggggctgatttctcgttttgagaatatctacttccgcttcaaggggctggtcatctgctgaaccacgagtatgaacggctccgcgccaacgtcattccgccgttttggaacgttgtctacttgggcaacagcccctcgaaacggaagtagaccttcagaaaagaccaaatcagccccttgaaacggaggtagagctggtttaactgcctgttgggcgcaactctgcgcctaacgctaaggtcaatagcatgaacggtctgtttgtttcgtttgaaggtgtcgatggcgtgggcaagaccacgcaagtcgagcggctgcgtgcgtatcttgaggctcaggggcgtaccgtggtcgttacccgtgagccgggaggcactgcgttaggcaaggccattcgccaactgctgttgcacggtgtggatgggggcgccgtcgacatcgcaccgcgcgccgaggcgctgctattcgctgcagaccgagcccagcacgttgccgaaaccatccgcccggcattggagcgcggtgaagtggtgatcaccgaccgctatttagactcttccttggcctatcaggccggtggccgcgaactcacgccagaagagattcgatccttaagcatgtgggccaccaacaacctgctgcccgaccgcacgtatttgctggatatggacccagccctgtcccaccatcgcctcgaacacgcggaagaccgtatggaatcggccggtgatgacttccagtcccgcacccgccaggccttcttggacttggccgccgccgagccgaatcgtttccgcgttatcgatgcgagccagagcattgaagcggtatgggctgccatcgaatccgacatcaaggagctcgcatgagcgtatgggattcactagtcggccaaaagccggtaatcgacatgctcagtcgtatcgcgcagggcgacccgagccagatcacccagtcgtggctgatctgtggacctcccggatcgggccgttccaacatggctcgtgcgtttgcggcggcgctggaaagcccggatcacggcatgagcgctgagcccacgcgcgtcacccagcaggtgcttgccggcacgcatccggatgtcacggtgctgaccacgaacaaggtgactattggtatcgatcaggtgcgtgagatcatcactacctccgagcagatgcccgccaccgcgccgtggcgcatcatcatcatcgaagacgtggatcgcatgcttgagcgcaccaccaacgtgctcttgaaagagattgaggagccggccgagcattgcatctggctactgtgcgcgcccagcgcccaggacgtgctgcccaccatccgctcgcgcacacgcatcgtgaacctcgccgtgccctccacccaggcggtggccggattcctgacctccaccaccaatgtcgagccaaaagtggcgcagcgtgcggcccgactcgccgaaggccatatcggcatcgccaagttgtacgccaccgacgaacgggttatgtccgaccgcgatgaacttgtggtcggtgtgctgaatctggcccgtgcctcggatgcagtgttgttggccggcaatcttatcgacaatgccaaggcccaggccgaggcggacgcgaaccgcatcaccgccggccaggaagcggaattccgccgcatcaacggactggcaccgagcgaccgcatcccgccgaaactgcgtggcgcattcaaccagattgccaagaaagacgatgtgaagcgtttggtcacccgccgtacgcgcgacgtattggatcgtgcgctgaactccatcgcttccatctaccgagatgtggcggtgctgcagaacaatgcggaggattcggtgggcctcatcaacctggagaaccgctcgtcgatcaccgaattgtcggtgcggttgaaccgggccggtgccgtgacccgtctggacgaagtggcccacgcccgcaagcgcctagccggcaacggcaacccgctactggtattcgagtccctcttctgcgccctgatcccataacccgacgcaactagcccccctctgatgagtgggggctgtcgagcgcagcgagactgggggagagaccccgtaacgcacagcccccagtacgtcacacatatgagcgatactgggacgtatgaagatttccgccgatttcaccgtcatcccggacgatttcgccaaggccgcggcccctgaatatttcaatggtggcgtgcctgtggtctccttcccgttctacatcgatgatgtggatcccgaggcccgctacctgcactgggagttcgtggacccggattcgattccggtctgcggcttcgagtggattcactggtccgtggccaatctgccgattgatgcgctgatgtacgacttcaatgattcacatgcgttggccatcccgccggacttctcccgtcagctgccggccatgattcccgagaccgtgcaggggcgcaactcctcggcctccaagttcttgggccgcagcgctgacccggcggtgatcatgcggtacaacggtccgcagccgccggacaaggatcatgagtactacctgcaggtgtgggccaccaagaagccgttgcccggcttgaatcagggcttctggctcaacgagctgttgcacgcgctgcgcaacagcggtgaagtgcccgacaccgacggcatcttcctgaccggcaaggcgtgagccacatgagcccccgcaggcgggggctgtcagcatcactgactgggggtgggtcagtacaaaaccaccttcagtccgacttcgtcgtccagctcccgccagtgggagcgtgaccacaacaaagaaaggacaccatcacactatggcctgcaccacgattctggtaggcaaagacgcgagctatgacggctcgaccatcatcgcccgcaacgaggattccgcgaacggcgagttcaacccgaagcgcttcatcgtcgtgaagccggaggaacagccgcgcgaatacaagtcggtgatctcccacctaaccatcaccctgccggacgacccgctgcagtacaccgccgtgccgaacgcggacctcaaggaaggtatttggggcgaggccggcgtcaacgaggcgaacgtggcgatgagcgccaccgaaaccctgaccaccaacgagcgcgtgctcggcgccgacccgttcgtggaatacacgccggccaagggcgatgagcccgaggtgcccggcggcatcggcgaagaggacttcctgaccatcgtgctgccgtatgtcaagaccgcacgcgagggcgtccagcgcctcggcgcgctgcttgaggaattcggcacctacgagatgaacggcgtcgccttctccgactccaacgaaatctggtggctggaaactgtgggcggccatcactggattgccaagcgagtgccggacgaggcctacgtgaccatgccgaaccagctcggtatcgacgaattcgaccttgaggacgccctgggtgaccaggaagcgcacatgtgttccgaagaccttgccgaattcatcgaaaccaaccatttggacctcgcggtggagaacactaccccgttcaacccgcgcgatgccttcggctcccactccgactccgaccacgtgtacaacaccccgcgcgcctggtacatgcagcgcttcctcaacccgtacgacgaggtgtgggacggcccggacgccgaccacaagcccacctccgacgacatcccgtgggcccgtcagcctgagcgcaaggtgaccatcgaggatatcaagtacgtgctgagctcccactaccagggcaccccgttcgatccgtacggccagctgggcgatgagcgcacccgccacatgtaccgcacgatcggcatcaaccgccagagccagctcgcggtgatgcagatccgcccgtaccgcccgcaggcctcccgcgccatccagtggatggcatacggctccaacccgttcaacacgctggtaccgttcttcccgaacgtggacaccacgcccgcctaccttgaggacaccaccacccgcgtgacgtccgagaacttctactgggccaaccgcatcatcgccgccctgtgcgatggcgccttccgctccacgtccaacgccgttgagcgctaccaggagaagaccggtgcgatgggccaccgcttggtcgccgccaccgacgagcagatcgcccgtctgggcttgacggccgccgaggaagccgcgcagtccgccgctgaagaggaatttgaggccgacaacgtggatggcgatgtgcagccgatgaccccggacgagaccatcgccgcgctgcgtaaccccgaggtgcgcgagattctcgccgccgccaaccagaccatggccgaccagctcaaggaggaaaccgaaaagctgcttgactccgtgctgtacactcgcagcatggaaatgaagaacggcttccacatgtccgacttttagtccgtattgagctcccctccctgaggggctgagccgttaagaaaacagcccagtgggctgtttttaggcgaagaggcggcgactgccgccccaccaccccgccccaccacacaaacacagaaaggctttatatgaccaccatcgaagacttcaccagccagtacggtctggtccagaagatcgacgcattcggctacatgaagtacctggccgagaaccctgacgccccgcgcaagcacggcaaggtggtgctcgtcaccgccgatacgccgctcaaggcatcgcgcggagaaggcaagaccaccacgaccatcgccctgatcgacgccctgaacaagcgcggcattgatgcgaccgccgtgctgcgtcagccgagcatgggcatcaccgcagccggttccaagggcggtgcctccggcggcggcaaggcttccctgacccaccccgagctcatcgactggggtctgtgcggcgaaatgggcgccatcgaggcggcccagaacctgctcgtctccttcgccgagaaggccatcgatgacggcaagctcgacacgattctcgtgccgcgtgtctccgaggttccgagccgctccctgcgctccaccgccgtggactacggcaagggcaacgtgccggagaaggtcgtgctcacgccgacctgcgagctcatgcagattgtggtgctctcccgctcgatggacgagatttccgagcgcgtgtccaagatgatcgccggcaccaaggacggcaaggccgtgaccttcggcgaattcgtggacctgtggcgtatcactggcattttggccgacgcggtcaagccggccaagaccgaaaccgtaaacggctccccggtctacgtgcacggtggcccgttcgccaacgtgtccatcggcattccgacgctggtctccgtggaaatggcctgcgccctgcatgacgtggtcatcgtcgaggccggttacggcaccgacgccggcgcccagaagtggctggacatcgcctgccgcgaatacggcgcgcagtggccgtccgccgccatcgtggtgacccgtgcctccacctggcgcgacgatcccgagctggcctggcgctacccgttccacgtgcagcgcctggagaacctggacattccgaccttcccgctcatcaacctgtgggaaggcgaggacgatcaggttccgtccctgaaggccaccgccgacgagctgggcttccgcacgccgatcatcggcaacctgttccgcgacggcggcgaggcgctggccccgcagcttgacggtttcgtcgacgcgttgcagaacggctccatgccggccgaaccgcactcgcacaagggcatggccctgaccgagaacgccaagtgggtggccgagaacgcctacggcgtaccggccgagcgcgtgatttacaagccgggcttcaccgagtccgtgtccgaggccatggaactgtgccagagcgcaggcatctcgctggacgatctggcgttcgtggcggtcaagtccccggcgaccatgaccgacaacgaccgtgcccccgaagaagagcgcaccgtgaccctgaagaaggttgaggtgcatgccggtgccggtctggtccacgtcaacctgaccaccagcctcaccacccccatgcccaagatcgtgtgatgacaggcacgaggtgaggtaactcgcttttgaggggcggattttcggttttccggaggtctatctgcgtttcgaggggctcttcgattgcgaaatccggagtatgaccattgaaattgcaatgtttatactccggttttcttgttttaaaagccccttgaaacgctagtagagcttctgaatgttggaaatcagccccttgaaacgtagaaagcccgccaccggcgggctttctacatctgagcttccctctttgaggggagctgtcagcgaagctgactgaggggagccagcatacgcaaactagaagttgctaccctgagccgttaaacggaaagcccaccgggctttccgtaggcgatgcgagcagctatgctgcgaggggaatggtggcaactagaagttgccaccattccagccccagtcggtggtggcggtgtaacggatgtaggtgcggtcctcgggaatgccgagcgtggagttcagcgcggccataatgctctcggtcagcttttcccaagcagagcccggcacagagcggccgaacacgttgacttccacataggcggcgggctggtcatcgctaccaccgaagtaaatcggcatattgtcctcgaacgggcacattagccagccctcggacttgcccggcacggcggtaatcgccttgccataggcagccttcaacgcctcgcgctgctcaggggtggtgggcacggacacatgagtgtgaataacgggcataattcctccttgattcggttcgcttccagtctagcctcagcggttgctgttgaacatggcatgcggatgtaggaagctgcttgcagaacggaccggggcaaggccaatttggggagattattggcctttccagccaatatatgttccgcagtcagcccaatagtgttgaatacccttgtgagaaaactgattgaacaactgatgaagttcggcattgtgggcgtcatcgcctttgttatcgactggggtattctcaacctattggttggcatattccacatgcacaacgtgctggctgccaccgtctctttcatcatctcgctgattttcaactatctggcgagcatgaaattcgtattcaagcatcgtgatgacatggcgcgctggatggagattcttatcttcgtggcgggcgctgtagtcggtctgttcatgaatgacgcgattatctggatttccacttatggcatgaaccatgatgcctatgtatcgcagcatgccgaatatctgttgcgcaccaatatcggcaagttggtggccactgccgtggtaatgatctggaacttcttgattcgcaagtggctgctcgacgatacgcacaccaatgcgatgaaccgtctgaagtccgctgaaaatcgactgaatgccgaggagcttgaagccaagtggcagaacagcttctcccacaagctcggcatctggtccctggaacacacgcccaaaggctggccgaagtagcggtttgacgtattaagccccctctgacgagggggcttaatttttgtctcacacactcacttcagtcaaggtcggctgctcggtggagcccttgatctgcttgaagccaatcagcgcaatcgccagcgagaccagtgccaaagtggtcaccaccatgaagccgccatgcgagcccatgcggtcgatgaactggccggcaatcgccgaaccggcggaggagccgatagaattcatcgcacccatccacgccatgccttcggtcaggcgggaaggcggcaccaagtgcagcatgagctggttgccgttaatccacgtcggagcctggcacacgccgatgatcaggtagatgatcataatcacccacagatgcttggcgaacaggaacgtgctgatgccgatgttcaccacggccaggcagaagtagaagcgcttccacagggcaatcgaccagttcttcgcgccgtacaccaaggcgcccatcaacgagctgatggagaagcaggcgaatacaaagcccgtgtactgcttcatattcgactcggtggcgaatgcgatgatcgagatgcctgtagccgactggaacgcgcccaagccgaaccaggtgacgcataccgcaatcagacccggtccccagatggacgccttcttgccggaacgcgcatcggcgaccgcctgctcaatggcggcgttaatcgtggcctcatcggtcacgccttcgcgctcaagacggcggcgagtctcctcggctgcggtctccaccttcaacgcttcggctcgagccgcctcgcgctcacggtattccttgcgggaaatgccctcagcgcgggccagctgagtctgtgacggtggctcagtggtcagctcggtcaagaacatcagcgcgcccaccaccacgcacatgccggtgaacgagaatgccagcagaccggagatcacggccagtgtggaagccagtggattgccgattacccacatgcattcgtccagcacgccgcacagggagagcgcacggttggtacgctcctgatcgcccttcaggattttggtccagcgcgcgcggctcatcgcgccccacggcggaatagctgccaggaacggcgtcaaacagtacagcacccattccggcgcacgattggtgatggatgtggtcagcgcgacggcggcgacaatccacaccagaatcgttggaatcgaaacctgccgctggccgaacttgtcggtcagcttgccgagcagcggcgtggccacggccagtgcaatcgcctgaatggcggtgagcatacctgccagcgagtagttgccgtagtaatgctgcacggaaatggtgatggtcatgcccaccatcgggaacggcatgcaggcaatcaccgaaccgatggaataacgagcggtatgaggtatgcgcagcaactccgcatacccaccaaaaactttgtgacccacttccttgatgccagccataatggtgttcgagttggacaggttgttggacataacagcactacgctcctttccgctcccgattggatgttccccgctgacgtggcgttgccggcgaagccctcatcgaatgatgtgttgtccatggtcgcgcaaagtttgcgttggatttccctattcgcatatttgcgtcacggatactctaatcgttggttagggcgcgacacgcggtagattggagatattaagacaacgttctcatgttcttcggcgaacatcgcaagatgcccgtaggaataaaaagaaaggcggctcatgagcgcaaccaccatccacttcgttcgccacggcaaggtctacaaccctgaccatctgctctacgagcggctgcccgacttccatctctccgatcttggccggcgtatggcacaggccaccgccgcctatctggccaatagccctcagaccaatacgatttccgcggtgtattcgtctcccctggaccgcacgcgcgagaccgccgacgcgattcttgacgcgttgaatcccgtgcgcgaggcccgaggcgaagccccgctcatgctcaccgccgatgagcgagtgattgaggccggcaacgagttccgcggcaagcgtatcggccatggcgaaggcgcgctgtggaagaacggcaattggaaactggtcaccaacctgtacaagccgagttggggcgaatcctatcagcacattgcgcagcgcatggatgatttcgcacgcgagaaggtcgcccaacaccccggcgaacagattgtggtggtcagccacgaatcgccgattttcagttatcgccattatctggagaccggccaccccgagcactggatgttcctgcggcacacggcgctcgcctccgtgacctcggtgacgtacgacaacgaaaccggccgtgtgatgtcaatcacgtatgtcgacccagcagccaacgtcaagtaacggcacactggtgaatagctgagctacaatctgggctcccctcagagggagccaatgggacgcactacaatcaagtggtgaacgcagaggagcatgaatgaccattgaactcaatcgtgaggcaatcgcacggatcgcggcattgccgggggtagctgaggccgctgaagccggctcggcgctaattagcctgtggccgctgaccgaagccatgcagatggacaatgacgccaagtatgcggagaacctgcaggttcgcgtcacgcgcgcattcgcccgcgtgctgaccggtgaagacgtcacggtgcccgatgccgaattcgtctatgaaggcgccgatgagattcccggccgcccacagaacatcgtcgatacgctgctggccgccaacgatgcctacgacacgatggccgactactccgaatccggcgatgtacagctgatctttgacgccgccgaagcgttggacgttcgttgggacaccgatgttgcggctcaggtccgtgagacgattgccgccgtggaagcccagattgaagacgacgccgcgcagggccgtctgtctacgtccagcgagcccgctgatgtggccacccgttttgccactgcgctcgccgtgtgcgatgcgctgctgagcgtggtgaccggtgacggcgaacacgatggcgacgccgcagctcaggcggtcaaggtgctgccgattctgctgtacgtcaacgagctgcgcgagcagtgctcgattccgcgcatatgcctgaccgatcagcagattcttgagctgattgatacgcgcgctaaggccgctggcgcggacacgctgaccgccaccgccgaatacatcgccctgctggccggtgccgaatggaccaagcaccgcgacgatgtgctctggaacccggacgaagccaagaagaaagccaaggaagaagacgaaaagcgcaacaaggaggccttggccgccaagtttgcgcacattaaagatgaccctggcaaagaaaccgtggagttgtgagaatcaaggccgcttagcccgcctgatcggttctcttacccctgctcgcgattcctccgtgccaaggaaatcgtctatgtggtgaagaacatcgcttacgcaacggaagaagaaacacttatgggcaatggcgtcaatctgcgcacgctcaccaatgacggcggtagcgcggtaatcagcgattacggggcgcatctgctgcgctgggccccggcggggcagccggatgtaatctggacgccccgcacatggcatttcgaagctggtcagccggttggcgggggagtgccggtgtgcttcccctggttcgggccggggtttgtgcatggcgggcagactgcgaagcgaccgattcatgggttcgcacgattgcgccagtgggcgctggacgaagaggcgtttaccggtgcccgtgtgcggtatgtgctggattccgaacgactgacgactggcgaagtgccatggatcgaggatgaacccaacgtgcgtttccatgccgcatacgaggtgtgtgccagcgatacgctgacgatgacgctgaccgttaccaacacgggaggtgagccgatgtcgtatgaggcggcgctgcactcgtatctgcatgtcggcgatgtgctcggcgcgcggctggtcggtttgcggggtgcaacatatctggatgccacggaagccggattcccgccaaaactacaagaacagccatcggtgatgttcggcgatcagccggtggaccgtgtgtattattccgatgctgcactggaattgcaggaccgtgtgctgggtcgtgtgattcgcatcggcaagaccggctcgccgcagacggtggtgtggaatcccggagagcagggcggcaacgccattgcccatgccaagacgggtgaatggcgtggctttgtggccgtggaggcagcggcgtgccgagaccgtatcgttgcccttagtccgggtgaatcgtatatgctttcgcagtccattgccgtgatgccgttggggtagttggctgaatacagtgccgataatacagtgccgagaatgatgaagccctactcgcgttgagtagggcttcatcattggttgcggggaacttcttcaacggaagttccccgatatcggttactggccttgccagggtttctgggcattgtcgccggcgggagccgtgtgctcagaaggtgttgcggattcgtcgccggcgttttgaggcatcggcggaacctggccgtactgtggggccggggcctccggttggccgtactgcggggccggcacctgaccgtaatcaggtgcgggtgcagccggctggccatagtcgggggttggcatgggcggctggccgtaagccggggccggctggttgaagccgggtgcgggcgcgttcggagcggcgaaattcgggggtacaggcgtgctgtatggtgcgccgtaagcaccctgaggcatgggggttgccgccgcgccatcgtcaaaacgtgcgccctccggcttgctgggaagagccatgaacacgatatagacaacgcagccggccagcgtaatcaacgcaccaatgaccgccgcgccaagaccgccggcggccatgctgccataaccatagtcataactgccaaggctcctgaacccgccgtacagtgccgcaccaccgccgataatcatgatgataaggccgataaccatcgcgatatagaaaatggcaacccaccagccaggcttgttcgtgtcatgcagacggcggacggaaagtgccagggtggggattagggtcaccagaccccaaatggtggcgaggaagccaagcttttcatctgtggcggtgttgaggatgtccagcactatattgatgccgaaagcggccagcacccaccaccagaattcactgcgggacgcgcggcccttgaacaccgtgtacttcttccagaagcgcaggaaggcttcttggaaggagcatccgtagtaaggcttatccagcggcacagtggcagtgggcgcggcgtattggccgtaagacggcggaaccgggccgtaaggattgccatcgggggccggtgtgccgtacgccggtgcggattgaccgtaggtgttggcgtcgggcgcgggctgaccgtaggttggtacggcctggccataagagttcgcggtcggagcaggctgaccgtatgccggctgtccgtaagcgggctgcgccggctgtgagggctgcgccggggccggtgcgccatactgcggtacgggattaggtgtgggcgtaccgttggcctcaggctgctgaggcaaaggcacattgttgggatcagacattgattcccctttcataagacctatgtgtcacatcatattcttccattgcatgagtggaaaactcaacaattgcgccaaataatgtccaaagttgtggtgaatgcactggaaagaatcgatggttatcaaatcgatatcagttgagggtgaacgttatcgatcggttgtgtaacctgttgcatgaatattgcgcacagttgcgggggcggaactggaaagcagacgaagcttttggcgctatgcataaagcaacatacagagatgtagggaatgccatgaaccacgaatacacggatgccgccgttgagcagcgcgaatcgcacgaagacgaatctcaagactgggatctgctgttcgtgggcctggcctgctgattctcgtttgctgttttcttttcttttgattttgcttttaaaagaaaagcaaatggcaggcaaaagagatttcgttggaaaatggccgttttgggatggtgttggcccgaaacatcaataacgaagcaaaagagcgaggagcgctgctctccgcgtccggcgcgcgcggcacaataggggattatgactgatgctgaaaacaccaaacccgaactgcccaagaacgttcgtgttcgcttctgcccgtcgccgaccggaaccccgcatgtcggcatgattcgtaccgccctgttcaactgggcggaagctcgcgccaccggcggcacgctgatcttccgtatcgaagacaccgacgccgtgcgcgactccgaagaaagctacaaccagatcctcgaatccctgcgttggctgggtatcgactgggacgagggcatcgatgtgggtggccctcacggcccgtaccgccagtccgagcgtaccgccatctacaaggatgttgccgccaagctgctcgaagccggctacgcctacgagtccttctccactcctgaggaaatcaaggagcgcaaccttgccgccggccgtccggccgagttcggctacgatggctacgaccgcaacctgaccgatgaacagaaggccgccttccgcgccgagggccgcaagcctgcgctacgtatcaagatgcctgatgaagacatcgcctttgacgatctgattcgtggcaccatcgagttcaaggccggctccgtgccggactacgtgatcgtgcgcccgaacggcgacccactgtacacgctgaccaacccggtcgacgacgcgatgatggaagtcaacgtcgtgctgcgcggcgaggacctcctgagctccaccccgcgccagatcgtgctttaccgttaccttatggaactcggcatcgccaaggagatgccgctgttcggccacatgccgtacgtgatgggccagggcaacaagaagctctccaagcgcgacccggagtccaacctgttcaaccaccgcgacaatggcttcatccgcgagggcctgctcaactacctggccctgctcggctggtccattgcaccggaccgcgacgtgttctccatggacgagatgaccgagaagttcgacgtgcgcgacgtcaaggccaacccggcccgcttcgacatcgacaaggccatctccatcaacgccgagcacatccgtatgcttgagcccgaggacttcctgcgccgctcggtgccgtacctgcaccgcgacggtgtggtttccgccgacaactgggatgccctgaccgaccgtgagcgtgaggtgctgaccgccgccgctccgctggttcagccgcgcgtgcgcctgctgggtgaggttgccggcatggtcggctccctgctctccaccgagggctacttggagccggctgacgacgccaagaagcagctgaaggattctgccggcgaggtgctggacaaggccatcgccgcactcgaggctgtggatgaggctgactggaagaccgacaacctgcatgagaccctgaacaaggctctggttgaggagggcggctacaagccgcgcctcgctttcggtccggtgcgtgtggccatgtctggtcgtcgcgtgagcccgccgctgttcgagtccatggagatcgtcggcaagccggtttccctcgctcgcctgaagggcctgcgcgagcacctgtgagctaaggttccttccgtgctcggctgagctgtaaggacactcaaggtgggcgtctgcatgtgcagatgcccaccttttcttgtattcagtgatgagctggaacagctggaaagtcttaccgctgcgccgcatgccagtgagaatatgtacgaggttgaacatggctggtttgtgcagtgaggtcacgaaacgtgccttgtaggtggtttcgccttcatgcgtccatgaaacggttgataggtaaccgggcggcggtctttgacgtgacattgcattacaagcatcgcgacgcgctcgctgtcgcaagggaacataagcgcctcatttggttcttgaaggctgatttgccggctatgaatgtgcaaggcaaagatcattgcctcatctgcaatttcatcagtgcattagatggtaattcatcagtagtgcttactgataatccgtcagtagagttcatgcaaattcatcagtagtggcagcgtagcacttgaaatcgttgaaattccgcgcgacacgccgtaagttgcgtaagggtgaatacttgcgtatatttatcactcgttgcgcggttcaccgagcagccggttgaaaaactgaatatgcccccatcgtctagcggtctaggactacgccctctcacggcgccaacaccggttcaaatccggttgggggtacgacgaacaactccttggagttgctacgccaagccaaattgggatgtggtgtaattggcaacacagctgattctggttcagccattcttggttcgagtccaggcatcccagccaatgaccctcgcggaatgcgagggttttttgttttcagggaagtagccgcttgaaaagcgacttccctgcatatgagtgcgcataagagcgctaagagcgcatacgtgtgtatgaaagtacgagaacgaaggagatcgaagtatgtccgctgggcagcaggctgtaccggcaaacaacgccaacaatgcaagcaatgaaggcgctcagaagaagcacatgtctaaggcggccgtcgccattatcgccgtggtggtcgtggccattatcgtcgtggccggtgtgttcggcttccgcgcctactccgatgctcagtacaacaatgcagtcgccgcttgcgccgccgcttccgaaaatgtgcgcaacgccactaatgactacaacaacttggtcaatggcgatgcttccgaagctgctgcgctcaccaagaaggatgtaaaggatgcctccacgctggacgccctcaacaaggaactgagcgtggaactgccggtatacgaaggctgcgtagctgacgacactgccggcttcaagtccgctactgcgaagctcaacgagcaggctgattggtacaaggcttatactcaatcgctgcagaaggctgtggatgccgtgaacgcttccaagaagtaagcgagcacagcctcaccattgtcgtcaaagccgtcttgcggttgcgcaaggcggcttttgctattttgctcaatcggcttgctgctgtaatgctgctgcattgattgcgtcgaatgcaggtaaattcgtcttactttttttgcgcagtttttccctgcgcgtgtcgcgatgatgcgaatatagatgtgaaggttaacaacgtagtcgtttattgggttttgtgatttcactcacgttgtaattcaatgtcaaatatgtggcgattctccgtatttgctgagattgctattaagaatagcttcttgtaaagtgtcttatcgtaattgcgaatgcgtattcttcaatgaagaaggcatctgcttcacctcgaagaagagattaaggaaaatatagttaatgaaaaagaagaagactatatcggctgcgctggcaacagcgttagccttaacctgcatgggcagcgggggaggtactgcgttcgcagtgcccctgtctgatgctgacttgcagactttggcaagtcagattcagcaaatcaacgatacttctgattctgcaactgcttccgagactccttccgcacaagccgatgcggttgaaggctggactattgattccaacatcgctcagggcggcgaaatcctggagatggcaaacggttggctgcacctcaagtccactgcctctaacggtaatgcggcagcgaaccccagctccagcaacaactggccggcagtagccgtatggggcacagattacgacttctccaaggccggctccttccacgccaccatcaaatccccgcaggaaggctccgccaaccgcttcggcttctacctgggctacaacgacccgggcagcggcctgttcatcggctacgattcggacggctggttctggcagacctacaccggtggcggtagcggcagctggtacagcggtgctcgtatcgctgctccgagcgccaacgaagagcacgacattcaggtctcctggaccgacgccaaggtcgccacactgaccgtggatggccagaaggcattcgatgtcgattactccgcaatgacgaacctctccaacaagcttgccatcaaggccggctcctggaaggggctgaaccaggtcaccgacgtgtacatcaaggacttcccggaggttgtcgaagccgccaagcacgcggtttccggcaaggttgtggacgctggaggcgctgccattgaaggcgcaacagtgcgtttggataagaccaaggtgaagaccggtgcagatggcaccttctccttcgccgacattgaagaaggcgaacacacgctttcgattgccaaggaaggctatgaggacgtctcccagcaggtgacggtctccggcgcggatcttgccatcaatcccatcaccctgaccaaaaccgttcaggtcgcctccgaaacgctgaagaccaagaagatggaagttcagattaagaagaacttcccctctgtgctgcagtacacgatgaccgacggcaaggtgatgtacggccagtccaaggatgtgcgcaccgttgaaatcaacggcaccaacatcgaactgggcgatgacgacgtgaccttcaagaaggtttccgacaccgaggccacctacacgctgaaggtcaaggatgaggccaagaagattgacgcggtgatcaccgttcagatcacggtcaaggccaaccagctgcacctcaacgtcaccaagatcaagaacaacctgtccgaaggcattcctgagggcaacggtgtggaggagaacgccatccagacgctgtccttcccgaaccagagtctcgtttccgtgcgttccagccaggaaaatgcccaattcactggtgctcgtatgtcttccaacacgcagaagcctggcgataccaacttcgcagtgaccgaagatactaacgtcaccgatagcgactacacctacggcttcatctccggtgctggcctgagtgccggcctgtggagcaactccgagcacgatggcacctatgtggcggctcctgtgcgcggcggcagccagaacacgcgtgtctacgccaccacccagcagactggtgacgccacctccctgggcctggccagcgctccgtggtactaccaccgcacggtcaccgattccaagggcaagaagtacaccgtggccgaaaccgctctgccgcagatggccgtggccatcgccggcgacgagaacgaagacggtgccgtcaactggcaggatggcgcaatcgcctaccgcgacatcatgaacaacccgtacaagtccgaggaagttcccgaactggtggcatggcgtatcgccatgaacttcggctcccaggcgcagaacccgttcctcaccacgcttgacaacgtcaagaaggtggccttgaacaccgacggcctcggccagtccgtgctgctcaagggctacggcaatgaaggccacgactccggccacccggactacggcgatatcggccagcgtctcggcggcgccgacgacatgaacaccatgatggaagagggctccaagtatggcgctcgcttcggtgtgcacgtcaacgcctccgaaatgtatccggaagccaaggccttcagcgaggacatggtgcgccgcaactctgcaggcggcctgagctacggctggaactggcttgatcagggtgtcggcatcgacggtatctacgatctggcatccggttctcgtgtaagccgtttcgctgacctcagcaaggaagtcggcgacaacatggacttcatctacctcgatgtgtggggcaacctgacttcttccggttcggaagattcttgggaaacccgcaagatgagcaagatgatcaacgacaacggctggcgtatgaccaccgaatggggttccggcaacgagtacgactccaccttccagcactgggcagctgatctgacctacggcggctacacctccaagggcgagaactccgaagtgatgcgcttcctgcgcaaccaccagaaggacagctgggttggcgactacccgcaatacggcggcgctgccaacgccccgctgctcggcggctacaacatgaaggacttcgaaggctggcagggccgcaacgactatgccgcctacatcaagaacctgtacacccatgatgtgtccactaagttcatccagcacttcaaggtgacccgctgggtcaacaacccgctgctgaccgccgacaatggcaatgccgctgccgtgtccgacccgaacacgaacaacggcaacgagcagattaccctgaaggattccaacggcaacgttgtagtagtctcccgtggttccaacgacacctctagcgcagcctaccgccagcgcaccatcaccttcaacggcgtgatggtggcttccggtgctgtctccgcaggcgatggttcctccactggtgacgagtcctacctgctgccgtggctgtgggattcctccaccggcaagctggtcaaggattccgaacagaagctctaccactggaataccaagggtggcaccaccacttggaccctgccggacagctggaagaacctctccagtgtgaaggtgtaccagctcaccgatcagggtaagaccaacgagcagaccgttgccgtctccggcggcaaggtgacgctcaccgctgatgccgaaaccccgtacgtggtgtacaagggcgaggccaagcagattcaggtcaactggagcgaaggcatgcacgttgtggatgctggcttcaacggcggctccaacaccctcaccgacaactggaccgtcagcggctccggcaaggctgaagtcgaaggcgataacaacgccatgctgcgcctgaccggcaaggttgacgtctcccagcgcctggccgaccttaaggccggccagaagtacgcactgtacgtcggcgttgacaaccgcagcaccggcgacgcatccgtcaccgtaaccagcggcggtaaggtgctggccaccaactccaccggtaagtccatcgccaagaactacatcaaggcatacggtcacaacacgaacagcgatacggaaaatggctccagctacttccagaacatgtacgtgttcttcaccgcgcctgagaacggcgatgccacggtaaccctgtctcacaagagcaccgacggagcacacacctacttcgacgatgtgcgcatcgtggagaaccagtactccggcatcacctatgagaaggacggcacgctgaagtccctcaccaacggattcgaaaacaacgcccagggcatctggccgttcgtggtctccggttccgaaggcgttgaggacaaccgcatccacctctccgagctgcatgctccgttcacgcaggccggttgggatgtcaagaagatggacgatgtgctcgatggcacttggtctgtgaaggttaacggcctgacccagaagggcacgctggtctaccagacgatcccgcagaacgcgaagttcgaggcgggtgccaagtacaaggtgagcttcgactaccagtccggttccgatgacatctacgccatcgctgtgggccagggtgaatactctgccggcagcgtgaagctgaccaacctgaagaaggctctgggtgagaccggcaaggccgagttcgagctgaccggtggcgtcaacggcgattcctggttcggtatttactcgaccgcaaccgcacctgatctgcagggttccaccggcaatgcacaggacttcggcggatacaaggacttcgtgctcgacaacctgaagatcgagcgcatcgagtcccagacccgcaccaaggccgaagcgcaggacaaggtcaaggaaatccgcggcaagtacgattccaagcgtgctgagctctccgatgccgcatggcagcagtatcaggacaccttggtcaaggctcgcgtgctcatcaacaagaatggcgcaaccgctgaggacttcaccaaggcatacgacattctcgtggccctcgacgagtacatgaagaccgctcccggcaacgagagcagcgacaagtacgacgtggcagctgacggctccgatgagctgggtggctacaccgtggccacgggcagcgaagagcctaccgcaggcctgccgagcgaaggcccggccggtctggcacaggatggcaacgacagcacccactggcacaccagctggagcaagaacgcagtcggcaacggcaccgcatggtatcagttcaacctcaacaaaccgaccaccatcaacggcctgcgctacctgccgcgttccggaggtatgaacgccaacggcaagatcaagggctacaagatcacgctcactctggaggatggcaccaccaaggatgtcgtcaccgatgctgagttctccaccaccaccatgtggcagaaggccagcttcgacgccgtcgagaatgtgaccgccgtacgcttgaccgtcctgtcttccgcaggccagagcgactcccaggccaacaagttcgcatccgctgccgaactgcgtttgaccacggaccgcgaggttgaggaagagactgtcgctccggacaagaccgacctcaacgacaccatcgccaaggctaacggtcttaaggaatccgactacacggctgaaagctggactgctctggtcaaggcccgcgaagctgcacaggccgtggcggataacgataaggccaccgcttacgatgtggctctggcgctgacgaacctcgaatccgctatcgctggtctcgagaagaccggtgaggagcctggcccaggcccggttgaggtgaacaagaccgacctgcagactgcagtgaacaaggcaagcaagctcgagaaggccgattacacgaccaactcgtgggaagctttcgccgaggcactgaaggctgcacagcaggtgctcgacaacaagaacgccacccagcaggatgtggataccgcactgagcgctcttcaggacgccatctccaagctggaagctgccaccgagccgaagccgaatccggaaccgggcgtggtggacaaggctgctctgaacgcgaccatcaacaaggccgccgccatcaacctgggtctctacaccgacgactccgccaacgctctgcgcgccgcgctgaagaaggcccgtgaggtctccgacaacagcaacgccacgcagaagcaggtcgacgcagctcgtgaggctctcgagaaggcaattgccggcttggtgaagcgtaccgctgccaagggtgatggcaatgtcgtctccaacacgggtgccaatgtcgtcacgattgctgtggccggattgctgctggccggtgccggcgccgcaatcgcctaccgccgcaatcgcgagcagatgtgatcatgaaaccgtaaggttcgcgaccacataaggagcactccttattatctcggccggtgccggtcagcaatgcccagcgccggccgtttttgtatgaatcagtgttttccggtcacccagcgggcatcggaatgcacatgggggatcatcatcacaatgaccgcaatcagacagacgatcatcaccatcaaaataacgtcctcatgaccgcgcgtctgcagcgtggctccagtcaaagcaccgagcgccaaagccagcattacaatcgcgcgccggccaagtttggactgctcatgaccatgcgccgaagtgtcagcgataatcccagttaacgtcatcgtcaacacagtcgtgggcaaatctggcaccgaaagcttacgagcagtggaattctgaatgcccatagccggtgcgagcagcacaatcagcagaataatatgcaaatcaatatgccgagcagttgggaagttcagactgggctgtgccgtgcgggcgatggctgaagcatcagtgccacccatcgacggttcaggcgcaaactgattgagcagataaatgccgacgagcgcagctgccacaaaagccagctggattgacgtggacaccagcagatggcgcgcgcggttggcgccaaagtaatgaataatgcgtccgccgatgaacgcaccaatcatgaacgtggccagcgtgagcgccgaagtccaccagacgaagccctgcgcgtgggcgaatgcaaaaccaaggaacacaatgttgccggtcacattggccacaaatacatgaccgagtgccaagtaacttaacgcatccaccagtccggcgacaaacgtgagaataaccagagctggggaaagcagaccgtaccgatcatccttgcggggaatcagtgtgcgtcctgcttcggcaaggtgtgaggtcatggtgggagaggctttcctttgctgtttggcggtattcaatagctggcgcgcggccttgcacattatgaagtgtgtgccggacggtatatgtcaatgagtctgcgctcgcatgcggagtgcgtgcaacagttcgctatgagttcacctgcgattcgctgaacgcgcatagttcggtaacgcgatttcgctatatctggtcgtaataccgatgaggctaggaaaaggaatgattatgcagtcagataacagccatcatgaagcacatcagaacgacctgaactacagcagtgagtaccagtacgatatgtatatgtatgccgagtacggcatcgagtggtgattgagagccccgagtgagaattggactcacgacctcttccttaccaaggaagtgctctaccactgagctatcggggcgataatgtgcgcacggcttagggccgttgaacggcttgcacaacaatacacgcaatcgcgtattacgcaaatcgacgggtgtacgaggaagtattcgggtgctctaagttgtacacatgagcgcaatattggctattttgcgctcatgtggcattcggatgtgccacgtaatcgcattttcgtgtttttatgcgctgttgtggcacgaaaattgtgggaattcggtcgtctcggaatatgtgccatgccacgccactgcaaaaacagtgaatgtgcacgattgtgcacatatttggaccgctgcgtatatgcatgtgggtgcggataacaaaagggttttgacaaaagccaaaaccctgatggcggaggatacgagattcgaactcgtgaggctgttacaccaacacgctttccaagcgtgcgccatagaccactaggcgaatcctccatgcactgcagtgcttgctagaagcaagctccgtaggcaactcgaataagctaccacagctttcggataaatgcacattcagtgccggctgcggcgtgtcgctttgtgggcaaggatcaccaatgagtgcctgcgctgatgtgcaggtcgttcgtacggcgtgtgcaacaggtgatctcaccgggggatgaaccagtgcaaatcaaggcgactcaaggcaagtcgagcaaacccgaggcaaaccagaatgaacatgcgcatgccatcgcgtgaattattgccagcctcttgccgtgatgcaacatagtggttttaggctatgaaccttggtgaaacagttggtcatgcaatatgagggatggggagtggccagtcgcggggagttcataattcgggaagtctcccatctgtgagcgggacaatatcgaatattgagacaatctgcggtaataattgatcgaaaaacagtgcctaatacctcttaaatcctaaaaaaacaagactgttcctcaaaaaagtttttctttatattgagtagttggtttttgattacttagctgcgcagagagagggataggcatggttcgtcgcgcccaggctgctcttcggtccgttgaacacaccagcgtgaggcagctgcgagtcctggctgcgattgtatttctgttcgccatggtcatcgccactgtggctcctgcagttacggctccgatggccttcgccgacagcagcaccagctcgtccagcgttgactacgccacctgggccgaagtctccaaggcgatggacaagcagctgaacagcggtcttaagacgtacaaggatggcaacaccgctggcgccacctccgatttcatgggcgcgtacaacaagatttacgtggcctccaacttcaccgcggtcgtgcacgacaccattggcgcggacaagcagctcgcccaacagcaggcattccaaagcgttcagaatctttcctacacgcctggcaacgacgatcaactggctcagcagattgatgcgttgaccgccgatcttgacgccacggcccagcagctcgactccaacgccgatctcgccaagccgaaggcgtacgccgaagcgctgcaggcgcagctggccaaagagcgcaaggagctcgacgccaagaaaaagaagaacccgggcaagggcaatcgttcatggaccgacgtggccaacgaaatgaccccgattctcgacaatgcatacaaagcttacgaaaagggtaatggtgccaagggcgccacgctcgtgaacaacgcgtactaccagtattacgagaagctcggcttcgaaaagaacgtgatgaacgccatcagcggcaaccgcgtctcgcaggtggaataccagttcaagatgtgccgcaagtccatgaacaccggcgtatccctgaaagacaccaagaagctgatcgacgacctcaaggccatgctgatcaaggacgccggcattcttgacggtggtgccgccgataaggaagacggtttcaccaagctggtcaccagctcctccggccaggcgttcctcgtgcttatccgtgagggtcttgaagctctgctggtggttgcagccatcgtcgcctacttggtcaagtccgataacaagcgcttcgtcaagtggatttacttgggtgtgctcgtcggtctgctcggcgccggcttggtggctgtgatcttcgtgttcgccttcggcggctccggcccgattcaggagatcatggaaggcacctgcgcactgatcgccatgggcatgctgctgtggacgagtaactggatgctgaacaagtccagcgtggaagcgtggaaccgttacattcgcaagaagaccgaggctgctgtggctgatgccgcagccgccgcaagtgccgacaacgtgacgctgaaaaccgtggtctcgctggctatgctgagcttcctcgccgtgttccgtgaaggcgctgaaaccgtgatcttctacgagtccatctacacgatgagccgcgatactcgcggtatgtggatcggtggtctgaccgccgcggtggtgcttgtcggcatcttcctgctcttccgcttcacctccgtgaagattccgattggtccgttcttcctggtcacttcgattctgatgtctgtgctggtggtggtgttcgccggcggcggcgtccactcgctgatcgagggcgacttgctgcccgccttctacctgaacggtgtgccgacgaacgattggcttggcctctacccgtacgtcgaatgcctagtggcgcaggccatcgcagccgttgcggttatcgcgctgttcgtggtcggcttcatcaagcagcgcaagctgaaggcgcaggctgctgccgaggccccggccgtgaaggcgtagcccgtctagctcgcccgtttcctcccataactgcagacaactgacagacttgcggcacggcctcggatcgatgccaattcctccagcccacgccgcacttatctcataactgaataattgcaattatctaagcgtgaatcctaattcaccagagatagagaaaaggaataacaatgatgaagaacaagaaactggccgctctgctcggcctgctgctcgccggttccatgaccgtgtccatggctgcctgcggttccaccaactccgcatccgacactaaggctgactcctcctcccagtcttccgactcctcttcctccgattcttcctccgattccggcgccggtttcgaagaggttccggttggcccgtccggtactgctgaagagcaggatcaggacgccggcccgctgaccgtgggcgctgtgtacttccagccgatcgatatggagccgtcttccatgggcctgaaggctgctgacgcttccttccacctcgaggccgacatccatgccaaccagaagggcaccgagctcggctacggcaagggcgacttcgtgccggatctgactgtgaactacaccatcatcgataagtccaccggcaaggaagtcgagggcggcaccgccacctccggtaccttcatgcagatgaacgcttccgatggcccgcactacggcgccaacgtcaagctcgacaaggctggcacctaccagctgaagctctccatcgaatccccggcctccaagggttggatgctgcacgttgacccggagaccggcgtcaagggccacttctggaccgagccgatcgaggtcaccttcgacaactgggattacactcctcgccagtggtgattgactaagcagaaagccccctcgtcagagggggctttacgccgctttagggagataattcttaggacggtctaaaactcccctcagtccgcttcgcggacagctcccctcagagaggggagcctaaggtgaacagagaaaggacgcgaatgcttgaacaattcgtggcagtgatgccgggcactttggcccccgcattgctggtgatgagcctgagcgtgatgctcacggtcggcgaggggcgagataagccgataagctcgcattggcgtctcatcggcctgatcgtcggcctgatcgccgccatcgtattcgccggcctgcgcgcctcggccgtgatcaatcagcgcacgttcgtcaactacccggtgttgtggtgcgcgatcattgccgacatcctgaccatcgtcgtggtggtgttcgcacgccgcatcaccaccaattggcagcagcacaaggtgttcatgcacatcgctaacgccgtggccgccatcgacatcgcgctcaccctgttctacgcgctgccggacgtgattctgcagctcgccatctgggtggaaccaggggagaccgcattcacttcggccatgctgctgcgcgctcttggtttcctgcttggcgtggccatgtccattattgtggccgccatcttccgcacgatgcgcaccactgccgtgcgctgggcgttcaccgtggccgtcgcggccatgatggtgattctgctgattcaacacttcactggtcttgcccagattctgcaggcgcgaggcttcccgatgaaccatacgatgttcgtggcgctggcttggtccatcaaccagaactccacgatgattatggcgcaggcgctggtgttcctgattcccgccgtggcctccatcgtggccggtttccgtatgaaaacccatgatgtgtcgggagccaacgaggccacgttgcgccggcataaggcattccgccaccacgccatcgccgctgccgtgtggagccttatcgcagccatcggcgtcaccgcaaccctgaccgtgggcgttgccgcgacccatcagaccatcactctttccccgccggaagcctactcgctcaaggacggcgtggccaccatccccttcagccaggtcgaggacggccacctgcaccgcttcgaatacaaggccgaggatggcaccgtcatgcgcttcatcatcatccgaaagaacggtggcgcgtacggcatcggcctggacgcctgcgagaactgcggcgacgccggctactacgagaaggacggcaagatcatctgcaagaagtgcgaggtggccatcaacctggcgaccatcggcttcaagggtggctgcaacccgataccattcccgtacaagaccggccacggcaagatcaccattcaaactacggatctggacgtgctgagcgcccacttccagtgagtcaggcaggagacaagaatcgtgttctttctgcgtatgattactcgttcgttcacccgacagctgcgccggcgcctgcttatcgcgctgaccgtatgcctgtcggcgaccgtgtccgtatcgatgctgggcgtcgtgttcgacgtgggcgacaagctcaacgccgagctgtccacctacggttcgaacatcaccgtgcagcctaaggcggacgcggtcgtttccgacctgtacaacaccgagtcgggcggcgcgacgtccaccagcgacccgaccgcttttctgaaggagtcggacgcggccaagatcaagacgatcttctggtcgttcaacatcaccagcttcgcgccgcagctcaacatccacgccacggtgaacggtaccaacgtgccggtcgtcggcacgtggttcaacaagaacctcaagatctccaccggcgagactaccgtcgtgggcgtggaaggcatgcgctcgtggtggcagctggacggcaagtggcccaaagacgattccgaccagggcgtgatcggcaagacgctggcctccgaactcggcgtgaccaccggcgacaccatcaccctcaacaaaaccaccgcctcaggcaagaagaacgagcagaaaatcaagctcaccggtgtctacgattccggcgacgaggacaacggctcgctctacatcgcctcctccacggcccaggtactcgccgacctgcccgattcggtcgacaaaatcgaggtcaaggccctgaccacgccggagaacgacctggcccgtaaggccgccgcgaacccggccgcgctgagccaggaggaatgggagacctggtactgcaccgcctacccgagctcgattgcctatcagatcgaagaggtgattccgggcgcggtggccaagcaggtgcgtcaggtggccgcgttgcagggcaatgtgctgcaaaagacgcaggccgtgatgattctgatgaccgtgctgagcctgatcgccgcagccgtggccgtggccaacctgatggtcgcctcgatcggcgaacggtcgggcgagctggcgttgctcaaggcgctcggtgccaccgatgccgcggtatcccgcctgatgctggccgaaacggcggcaatctcgctgctgggcgcgattgtgggcgcgctgctcggttccggcgtggcccagctgataggccgggtggtgttcggttccggcattacgatgcggccgatggtgttcgtgctggtgttcgtgctgctggctgtcaccgtgctgctggcgtccgcctcatcgattcgttcgattctgaatctcaagcccgcggaggtgctccatggtcgctgagtttatctacgtaggtgtggaaggagggaaccgatgaccaacaccggtatgttcttcagaatgctgttcagcgccgtgttccgtcggcgttcgcgcgcggtgatggctgtggtggcgtcgctggtcggcgcagccacactgttctgtctggcgatgatttgcctcgctgtgccgcagcagatgaacgaggagatgcgtgcgtacggcgcgaacctgattgtcacgcccaccgaatcgaccaatgccgacggcaaggccggcatcgacaaggcgatggtgcagcacaccactgaaatggtcaaggccaagggttccgcgaaatacgccacctaccgctacgagaacgtgcgcgtcaacgcctcgccgtacgtgatggccggcgtgaatgcggcgcaggtcaagaacctcaaccatcactgggtggtcgacggctcgtggccgaccgacggcaaggtgctgatcggacgcgacatcgccgacgccatcggcctgagaatcggctccgccatcaccatcggctaccgtgcatccgataacgccagcaccaacggcacttcgtcgaactcctcgatcgaccagcaaaccaaagacggccgtgtctccagtgacatcatggacacctccggtaccgaattccgcgtggccggcatcgtggacaccggcggcagcgaagactcgatcatctacgccaccaacgccgacgtcaacaagctcaccggcatcacgcgcggcgtggacgtcatcgagtattcggccggcgccagcgatctcgcaggcctggtgtccagcatcaacgacatgacctccatgcacgtcaaggcacagcaggtcaccaagatcaccgcctccgacacccgcatcatcaccatgctgcagacgctgttctggatcgtctcgctggtggtgctggtgctgacgctcgtcggcgtcggcaccacaatcagctcgatcgtctcgcagcgacgcaacgagattggcctgcgcaaggccctcggtgccagctcgcgtgccatcggcaccgagttctacatcgaatcgtcgctctacggcctgattggcggcctcatcggcaccgcaatcggctacggactcgccggttggctgtgcgtggcggtgttcgaacgctccatcgtattcaactggtggctggcgctgatttccgtgctgttcagcgcactggtcgccatcgtcgcctccatcccgcccgtccaccgcgccacccgcatcgaccccgccgtcgtgcttcgcgaagaataaagaaagagaaacgtcatgctacttgaactcgaccacatctcgaagatctacggcgacctgcgtgccgtggacgacctcaatctgaccgtgccggaaggcgaatggctcgccatcgtcggctcctccggctcaggcaagaccacgctgatgaacatgattggctgcatggacacgccctccaagggctccgtgaagctggaaggccgcaagctggaggacctgaacgccacgcagctggccgacgtgcgcaagaacctcatcggactggtgttccagaagttctatctggtgccgcacctgaccgccgtggaaaacgtgatggtggcccagtactaccattcggtggtcgatgagaagcaggccatggaggcgctggaaaaggtcggcctgaaggaccgcgcccaccacctgcccggccagctctccggcggcgagcagcagcgcgtgtgcgtggcccgcgcgctgatcaacgacccgaagctgattctggccgatgagcccaccggcaacctcgacgagaagaacgagaagatcgtgctcgacctgttccgcaagctgcacgagcagggcaccacgattatcgtggtcacccacgatgcgctggtcgccagctgcgcgcagcgcgagatcatgctcaaccatggcgtgctcgtcggtgagaagtggaatgacgaggatgcgcgcaaggcctacgaggcggccggcggcaagcccgcctccacgggtgcacaggtcgagggcgcgcagaacggcgagaccgccattggtttcactgaccccaccaaggccgcgaaaaccggcggcgaggagtagggccgtcaggggcatcgagcagtatgtgaggaatacatggcaagctgatggtctctcccccagtcagcttcgctgacagcccccctcgtcagaggggggcttaaggagcgtgaatatgaccgaaaagaatacgttgaagaaatccgcgacattggcggcggccggactggtcgtggctggcgcgctgctggccgggtgcggcgaatccaaggccacgccgatggacgatgcgtacgccggcaactcgggcgagaccgagaagtcgcaggaagagcagtcgcaatcccagtcgaacggctccgatagctccgacggctccgattccggctcatcgcacaacgacccgtccaccaccacgtccgacaagaaggacaccggcaactacaaggacggcaactactcgatcaacggccagtacggcccggtaggcgaggattccatcgacgtccatctgaccatcaaggacggcaacgtcgagaccgtcaatatcattgggcacccgttcaccacgatttccaagaaccatcaggacgacttcgccaaagccattaacggcgtggtggacggcaaacctctgaagggtctcaaagtggacaaggtcgccggcgccagctggacctccgacgccttcaacaaagccctcgaagtcgcccgccaggaggcttcgattcaggagtaagaccgctacttcagcaatgctggccacagcagatcggccatgcgcgaggcccaggcggtgtcgtcgtccattgctttgccctcgatggcctcatacgccaccaaagatccgataatcgtggacaacagcaacttctcgtcaacgtcctcgcgaaacacgccctgcgcgactccccgcttgaggaacgcccccacatgctccagccacggggtcaccacctggtcgacgatgtgctggaagaacttggcctcgctggacaacacaatgcccacgcgcttgacgtcgatgtcgttgtcgcgcacccaatcgaccaatcgctgcaatagttgcgtgaaatgctcacgcgtggggctgggcactgggtcgggatccgggatggccagatacatcgcgctgatctcgtgcagcagctcgtcggcattatgatatcggcggtaaatcgtggttttggccacaccggagcgccgggccacctcctcgatggtcacgccgctgatgccgcggtccaccgcaatctgcagcgtggctcgcatgagcttgcgatccgtcgcctcgcgcgtgcgctcaccgcgcggtgtcgccgtcgtatctgtcatctccgtcatctcttctcttcgaaatatgctcccgtacgctcccgctggcgagagctggctggcaaagccagactgagggtggtaagtccatgccgtttgtaggcaactcccggataatacctgctagctcagcactttagtgctctcgacttgggctacataccactggttgaaccgcaccagtggcttcctgagcaacagcccaagcaacagtagcggcggcacgaatgccagcagcattccggcggcccgccagtaatccatgtcgtagatgccggcgatggccgcacgcatcatcgtcaccgcatgggtgagcggcaagaacggactgactttggcgatgaagtcgggcaacatctgcaccgggtaggcagcgttcgcacccgaaatctgcacgatgagcataagcacgccgattgccttacccacattgccgaaactcaccaccatcgtataggtgaagaacgagaacaccagcgaggccagccatccagacaacataaacagcagcggatgcacggcctgcacgcgcaggaacagcagatcgccaccgagcgacaccgtggattgcagcagcgcaatcagcgcgaacaccccgtaatgtccaaggaagagccgatgcggccgcggatcgcccaatgctttgcgcgtccggcgagacacggtggttttcagcgtcaccaccatcagcagcgcgcccacccacagcggcagcagcgtgtagaacggtgccatcgacgaaccgaaattcgccaccgggaatacggccttgcgcctgagctgcaccggtgcggccaacgtactggccagcgtttcgggatcattgcccagcacctctttgaccatgctcatatcgccactgtttagtgcgtcgctcagtgtgctgttgaacgaagccagttcggcaccggcggaacgcagtttgccggacaccttgtccaaggtagtgcgagcgtcactgagcatatcgctggcgtcgtcggaagtccccttcaggtcgccgagcgtggagtccaactgggtggcgccggaactcagtatgccggaggcgtcagcgacggtggacgacagggagtcgatttgcggtttcaccgtggccgagaaatctgatttgatattggcgatactgttctgcgcttgatcagccagattcttgacctgcgcatgctgatcctgcgcgtcctgattgccttggcgaatatcggtcgccgccgtattcagcgcttgccgcagcctgttttgccgtgcgattgaacggtcaatcgccgtgatgatggatgagtcgttgcccagtatgccggccaacgtgttgcgaatttcagtgtatttctccgtctgcttgccaatggccgtggcttgacggtccaattcgtcggcggccgtggtggcaccatcattcgcgtcggaatacagcttgtctatggaatcggacaccgcgccgaaactggaggcgctcgcgtccagtgcgctgctcatcgcgtcagcggtggtgcccagggctccggccacgtcggtgacttcctgtttggtgctggcaagatccttgccgccttgtttggcggcagaggaaacctgagtgattagtgagttcgaggtgtcgagcaaggcgccggccgtatcggtcaatgcgctgtatgtgccaagcagatccgcagtatcgtcaagctgtgtggcgaaattggcgatgttggcgttgaaggtattcagttgctctttggcctcgggcttggacagctgatcggccagcgaagacgcgatttccagcccggccgaagtgatggtcttagcgaacgtggtgttgatttccgccgcaacctcatccgtgccctcgttgagcagattcggtgccagcgcgttcttcttctcgttgcggtaataggtcagttcggcatgctgcacgtcgtcggagaagaaggtcatcatgtctttgctgaacgacttcggaattacgatggccgcgtagtatttgccggatcgtgcgccctcgacggcatcggctttggacgtgatcgtccaatcgagctgactgttggcgcgcagcgcgttcaccacctgatcgccgaccgtgactttcaccgggatcaggttggaacgatacccctcatccacattcgccaccgcgaatttcaggttcttcatattcgagaacgggtcccagcatgcggccacgttgaaccaggtgaacaggccgggaatcatcaccaagccgatcacgatgatgatggagaccacgttgctggtcaggcgtttgatgtcgccggtaaacagtttccacatggtgttcatcgtgcgtgcctgccttccttggtcggcggaatagtggggatgattgcggtaacggcggcgctcgggtccgcttcttcgtggcgttcggcggaggtgtcgcgacgcttggccttatgcccgtacagcatggcgcggatcgactcgtcggagaggttgccgagctcggtttggcggcggatggaatcgcgcatgaattccacgaccatcaggaagcccatgatgatgagcacccatgccagccatgtgcccatgactacgattttctcgctggtggtcagcgcaaacacgataatgagcgcggccggcaccacgaatccggcgataagcgcacccagcagcagccggggataacggtaggcgaatttggcggcccgacgttcgatggcatgacggtattcgtcgcggtcggccagtgctgcaatggcctgagtgacacggtattcgctgccgggcaggtgcaccggctcgccgataatcatgtcgctttccttgatttcccgcgcgaacaggcggttgagattggccagtttcggccgggcgccgaggccaagcgcaaaggccagaaccgcgaaaaccagcaatttgccgatataggcgaaccagaggccgtcgtagaagccgccgatggtttcacgcatcgcgtcaatcgaataggtgaacggcagcagcgggtagatggcgcggaagaacgcgggcatcatttcaatcgggtacaggccggaggcgcccggcacctgcagaatgaccagcgccacgcatacgcctttgcccacgtgcatgaacgtggtggagagggcgaaaatcaccgacatatacaccagtgaggtgatgacgcaggtgagcagaaacactggggcgctcgcgcattgaatgccgatgacaagatcgccgatggccgtgaccaggccttggacggcagccagcgtggccagcagcaggaagcgaccgagatagccttgggttggcgtgagatcgtcgatgccctcatcgtcggtttcgagtttgggaatgaccacgagcacgaacgcgcccacccacaaagacagggtggtgaacagcggtgccatgccggaaccataggaggcgaccggatagacggcctgttcgctgataacagtgggggagagcatgaagtcggcgattgtggcggcatccagtttgccgtcggtgccgatcagggaactgagtgaactggagatgctcagggctttgatgtcggtgaccagcgtatcgagcttggtttgtacgccggccagcgccttatcggtgtcgcgcagcgcggtcaccgtggtggaggctgctttgtcgagttggtcgagggtatgcttcgactgatcgatgagtgagccttgcgacgtgatgccggtcgacagagtgctggcggtcgagctgagggcgttgagaccggtgttgagctgaggaatggcgccggaggtgatggtgccgcgagcggtattggcctcgcgcaccgtggtttgggtggcggtattgagatgctgcgccaatccggcggtgtctgtggaggcattgccgatagtggtgttcaggctatcgaggttgcccagtgcgccggcaagctcgctattgcggctttccagtgtggcaatggcggattgcagcggttctcgattggcgttcggcagccctttgagttggtcgatgatgtcggcgttcgcttggttgatgtcttccgccgtattgatcagtccgcctacctgctgattggcggcgctgatggttccggttaccgtgcccacgctttggttggcctgtgctgcggcttggctcagcaggcttgagccttggtcaagcgcttcggacgtggaggtgacgaagccgttcagactggtctgggtagtgccgatcagggtggagacgccggccagaccttctgcagtgtcgatgccaagtgtgcgtgcgtcgtccagcgcctgacgtgcggtgcgtgtctgctctggggtgtcggtgagtttggtggtgagcttggcgatggtgctgcgtgtgtgctgcacatcgtcggaggcctcggcaagggccgtgagggccttggctttggtggtgtcttcggtactgatggctttgccgtcaaccgtattgatgacttcggtaagtacttcggatacggtggagacgaatgtggaattgaccgtgcggtccacagtggacgcgccgacgtcggtgactttgggggcgatggcgctggctttttcgttgacgtaatactccagagtgggccgactcttgccgccggtcaccacgccggcgagatcgtcggaaaagtctttgggaatgatgatggctgcgtatgccttgccggattccacttggtccatggcctcggcttcggtgacgaaggtccagccgagctggtcgttgcttctcatctgcttgacgatttgatcgccgaggttttgcttgccgatgagcgcgttgtcggtgccgtcgtcattgttggcgatggcgacggtgatgcctttggtattgccgtacgggtcccagaagccgacgatgttgtaccacgaatacagtggcgggatgaacaccatgccgaacaggatcacccatgcggccggcaccttgaacaggcgcaggaagtcgcgtctgaggaccttgaagatattgcccactgatacctccggagcttggtgttgcttggttgctacgttttccgtagcgatacgttaatcgtagcgctacgtttgtagtagcgtaatacggctgccggagattaatggggtgattgatgatgtttttggcggaataacgccgctgcccagcggcttatcgtgtgtcgctgggcagagcaaaaggcgttctggaacttattgacaagatttctggatggtttttggacgtttcctgaacgcgatggataggctcggtgctcggcaatgtagacagacatgtaccgaccgcccatcaagttcagcaaaaccgcaatcgggtgatagggtgaggggacgctatgtggggaggaaaccatggttgaattcaaggacgatggcacggccactacccccggcaagccgtgggagaaccgtgacgccgagtccgcagtcgtggccgatctggtggccgtcgaactggacgacgccggcttgaacctgaacaccaagcgattaccgattctggcgcgcatctatggcgcggtcgtgctgctggacggactcgccacattgccgattatggtgatttccatcctctatgccgtgcgcgagattctggatggtcatgtgcacgtcgatgcgatgagcctgaccttcatcctgtccgcgattcatgcggtggtgctggtagtcagtgccgcatgcctgattgtgttcggcgtgatgctgctgcgcaatcatcgccggtatgccgcgcgctggacctacgtgctgatgccgttgacattggccgacggcatgctgtcgctggccctgaccggccttggcttcaacctgctgctgccgctgattcagatgattattctcgtcgtgatttcggtgaccgccgatccctccctgagcgaggaacgccgtctgcagcgcgcgctcaggcgtatggacgatcgcgatgattatgaatcggctgtggcggccggcatgctaggccgcgaccagtccggcaagggctatattgcgctggactttttcaatatcttctggctgtttaccatcgcttcggtgggtggcctgattgtggagacgatctaccatatggcgctgtataacggtgaacttcaggaccgcgctggtttgctgtggggcccgttctcgccgatttacggctgtggtgcggtattggtaaccgtgtgcctgaatcgcctgtggaaggcgaatccgttcttgattttctgcgcttcggcggtgatcggcggcgcgttcgaatattgcaccagctggttcatggaagcggcgtttggtattaccgcgtgggattacaccggccgttggctgtccatcgacggacgtacttcaggccaattcatgttcttctgggggctgattggtgtggtgtgggtcaagtggctgttaccgcgactgctggctctgattaatcgcattccatggaaagcgcggtattcgctgactgcggtatgcacggtgctgatggtgatcgacattgccttcacgctgatggccttggattgctggtatgggcgcatggccggccagccgcaggattcaccggtcgcgatgtggttcagcgaacgctacagcgacgcttacatggccaatcgcttccagaccatgcatatcgacccttccaaggccgggcgtatgtgaatggccggcaagtaattacgcttcgcgggcagaaggtgcgtaaaacctaagacagccctcgcgtgtgggtggtaagcgggatacactttcaagcgttgaaggaatgattccctccgctgatgcgctgttttgtgacgcgcgtgatgacgatgggacaatcaaacgaaaggcaaggcacatggccgaagctacagcaaacattggtgtgattggactggccacgatgggctccaatctggcgcgtaatctggcgcaccatggcaacacggtggcgttgttcaaccgccactactcgcgtaccgagaagctcatgaacgagcatggcaccgaaggcaacttcgtgccggccgaaacgctcgaggaattcgccgcgtccctgaagcgtccgcgtaccgccatcatcatggtcaaggccggtgctccgaccgacgcgaccatcgcgcagctggaagaggtgttcgaaccgggcgacatcatcgtcgacggtggcaactccttcttcaaggacaccatcaagcgtgagaaggaagtacgtgccaagggcttccacttcgtgggttgcggcgtgtccggtggtgaggaaggcgcgctcaacggcccgtctctgatgcccggtggcactgcggaatcctggaagaccttgggcccgattcttcagtccatcgccgccaaggtgaacggcgaaccgtgcgtgacccacatcggcaccgatggtgccggccactttgtcaagatggtgcacaacggcatcgagtatgccgatatgcaggtgattggtgaggcgtatgacattctgcgccgtggactcggcatggatgccgaggagattggcgacgtgttcgctgaatggaacaagggcgaccttgactcctacctgatcgagatcaccgctgagattctgcaccacaaggatgccgagaccggcaagccgttcgtggacgtggtcgtggatcatgccggcatgaagggtactggtacgtggaccgtgcagactggtctggaatgtggttctcctgtggctgccatcggtgaagccgtgttcgctcgtgcactgtcttcgcacggtgagctgcgtgaagacgctcagaaggaaggtctggctggaccgaacaagaccatcgatctggccggagaagacaaggccgcgttcgtcgaggacgtgcgcaaggctctgttcgcttccaaggtcgtggcctatgctcagggcctgaacgagattcaggacggtgccaaggaatacggctgggatatcaacctgtccgaagtggcccgcatttggcgtggcggctgcattattcgcgcccagttcctgctcgaccgcatcaccgaggccttcaggggcgataacccgccggcttccctgctgttcgatccgtacttcgagaagatcatcggcgaatcgcaggatgcatggcgtcgcgtgatcgttcgcgcggtggaggccggcatcccgaccccggtgttctccagctccctggcgtactacgatggtctgcgctccaagcgcctgcctaccgctctgacccagtcccagcgtgacttcttcggtgcccacacctacggccgcgtagacaagcccggcgtgttccacacgctgtgggctgaagaaggcaagcctgaaatcgaggcgtagcctcgtgatttcaggtttaggacagccctgtgggctgtccggccttcttcaggctcggcgatagccgagctgagaaaacagcaagcctgaaatcgaggcgtagcctcgtgatttcaggtttaggacagccctgtgggctgtccggccttcttcaggctcggcgatagccgagctgagaaaacagcaagtccgagatcgaggcgtagccatagacgaattaagccccctcatcagagggggcttaattcactcacaactcggtgacggtttcttcggtggagaaccagatgaactcgtccactccgttggcgtaggaggacgggtaatccgggttgttgggctgctcgaagacatgggccagcgattcggctttgccggcaccggcggcgaagaaccacgtatggcgtgaacgcgcgatgagcggcgcggtcaatgaaacacgcagcggcggcatcttgggggagtggttcacacccacggtgagcctatcagtaaccttgacctcatcatgaccagggaacagcgacgcatagtgaccgtccggtcccatgccgagaatcatcagatcgattaccggttccggccccaattcattcaccaactcgcgctcatagtcgctcgcgacatcgtccagcaacgcatcattcgcggcatcggcggcggcgcgaacggaagcatcatcgctgtcggcctgatccatcacatcggcgatgtcatcggctgaacgggtatcggccgccatctcatgaatattcgactcaggcagcttgccatctgccaccagctggtcaagcagcaggcgacgggcctccaaagcattgcgatcggtgtcgtaagccggcacaaaacgttcgtcgctccaccagaaatgcacgcgcgaccaatcaatcgcgtcagccagcggatcgttcagcaccaagcccagcggctgcgcggccgaaccgccagacagcgccacatccacacgcgtgcgatgcgtgccatcaggcaatcgttcggcgagcaaatcgagtagcgccaagacaaaacgttgcgcgccagcctgaatcatcagatctttattcggatacacaatgagttttcgagttgccatgtatggtccttgtatggggtatgtgtcgtactttgcaatgtggattgtgttgtcagttgacaacgcataatacgggtggcatgccgggaatctagccatttgcagcaatgaaatgtgttgtcagttgacaacacaatgtacattgtgcgacatcgcatatgtcactttattactccgcgggcatgagcttcggcatcgcatgaggtaggaaacgatgagcaacggcgttggcatggctcggccacaattgccgaactcattccaacgccgctgtggcaacgggttctaccgacttcagtgacgaatcagatcccagccttcgttgatgacctcggcgtagatctcatcgggatcgatgcgacgcagttcctcggtcaggcagtcctcgatggtgcgcatcggcacggacacttcctgcggagtctggccgggcagcgagatcagcgcttggtcctcatacgggcgttccagcgagatcacaccgtcctcacgggtcaggtacacgccggtcacggcctgcgcgtcgggcacgaactcagtttcgactggtacgccaagtttcagacgcagccatgcgcacagcatttccataggcaggaagtcggccttgccggtcaccttcgcggcggtgatgggcaggtgcggcggctgatcgagcatcgaggcgagcattgcgcgccagacggtcagtcgtgtccaggacaagtcgatatcttccggtgtccaattgcggcgcaaacgctcaatcgtggcctccggattattggagtgcaacgcgtcggtgatgcgactgcgggccatcgcacccatcagatccttggccgggttcgacggcggtgtggtcggccaccacgccactacaggcgcatccggcacaagcagcgggataaccagcgtatccgggtggttgataaggccaccgcgcggacgcaagatgatgatctcaccggcaccggcgtccgcgccgaatcgcacttgggcgttcaggttggaatcgttcggatcgttcgggccgtcggtcaaatcgacggccggattatcgcgactcgcgctcacctcggcggccacttcggccgcgttcggttcgccttcgccggactgatcggcaggattggtatccggtactacggcaatcacgcggcacgggtgctcacggctggccgagttcgcgatttccagcgcatgctctaggtccgcgtcctcggtggcgatgagcagcgtcagcacgcggccggtcgccgattcgccgcgctcctcgtgcagctgttcgattttgtgcgcaatctcgcgggtgcgggtgttcggcatatcgatgatcatggcatcctccagtggcggccgtcgcgcgccagcatttcgtcggcctgtgccggaccccacgtaccggcgcggtaggcctgcggctggccaagcgtggaccagaattgttcaatcggatcgaggatctcccagctgaggttcacctcttcggtggtcgggaacaacggcggatcaccgagcagcacgtccagaatcagtcgctcataggcttccggcgagttctcggtgaaggagcggccgtagctgaagtccatgttcacgtcacggacctccatggtggagccgcccggcaccttggctccgaagcgcatggtgacgccctcgtcgggctgcacgcgaatcacgatggcgttcttgccgagttcgcgcacggcggtctgctcgaacggcagatgcggggcgcgcttgaacaccacggcgatttcggttacacgcttgccgaggcgcttgccgcaacgcaggtagaacggcacgccagcccagcggcgggtgtcgatatcgaggcggatggcggcgtacgtttcagtggtgctcttggggtcgatgcctttttcctccaagtagccgaccacttcgtgcgagccctgccagcccttggcgtactggccgcgcgcggtgttggcggcgaggtccttgggcaggcgcacggcggaaagcaccttggtcttttcggcggtcaggtccttggcggtgaagctcaccggctcctccatggcggtcagagccatgagctgaagcaggtggttctggatgacgtcgcgtgcggcgccgatgccgtcgtaatagccggcgcggccgccgatgccgatgtcctcggccatcgtgatctgcacgtggtccacatagttggcgttccagatcggctcgtacatggcgttggcgaaacgcagggccagcaggttctgcacggtttccttgccgaggtagtggtcgatgcggaacacggagctcgggtcgaacacttcggataccacgctgtcgagttccttggcgctggccagatcatggccgaacggcttctcgatgatcacgcggcgccatgcgccctcggacgagcgcgacaggccggaggcggccagctgcttggcgacctgtgggaatgcgcgcggcggcaccgacatgtagaaggcatggttaccctgcgtgccgcggtcgcggtcaagctcctgcacggtggcgcttagacgctcgaaggcctccgggtcgtcgaacgtaccctgcacgaagcggatgccggcggccagattgcgccaagtcgactccttgaacggcgtacggcaatgcgcctggacggcggccttgacgaattcgatgaaccgttcctgtgtccagtcgcggcgggcgaaaccggtcagaccgaagctcggcggcagtaggccacggttcgccaggtcgtagacggccggcagtagtttcttttgtgccagatcgcccgtgacaccgaaaatgacgaggctgcatgggccggcgatacggggcagtctgaggtcgcgcgagtcgcgcaggggattgctccaattgggggattcactcataatgtacaagggtagtcgccggcggctatctatcgctagaggcgatatgcgatttgggctgcgatttgggccacattgcgtgtgctgtgccgtgcgttgggccaatcgcgtacgcaaacgtgtacgcaacgccgtagttgaaatatcccaaaacggtgtgtattttagaagagttgcccctttagctcaacggttagagcagcgtccttttaagtcgtgggttgtgggttcgaatcccacagggggcacaacaaatcctcggaatcgcaatggttccaaggatttttttgtttcgaccagcctggctcctagagtggtgtcccatgtcatgcaccacgattcttgtcggcaaaaatgccagttacgacggttccaccatcatcgcccgcgatgacgattcgggctcgggccgttacgatcccaagcgcttcgtcgctgtcgcccccgacgaccagccgcgccactaccgcagcgtgctgagccatgtcgaaatcgaactaccggacaatccttgccggtacaccatcgcaccgaacgtgctgaataatcgtggcattctggccgaagccggtgccaacgaacacaacgtggcgatgagcgccaccgaaaccatcgctgtcaacgagcgcgtgctcggtgcggacccgatggtcgagttgcggccggctgtcggcgaaccggacagcaccgattatcaggccgagcagcccggcggtatcggtgaggaagacatcatcacccttgtgctgccgtatgtcaccaccgcgcgcgagggcgtcgcgcggttgggcgaactgctcgaaacctacggcacctacgaatcgaacggcgtgattatttcggatgtggacgagatctggtacgtcgagaccatcggcggccatcattggatcgcccgccgagtgcccgatgactgctatgccacgatccccaaccagctcggcatcgacgacttcgacctcgccgatgcgttcggcgagcagcgcgaatacctatgcagcgccgacctgcgcgagttcatggccacgcatcacctcgaccgcacaatgggaacgccggtctcttccaacggccgtcacgcgcatagcgccggattcggaacaaccgttgcccttcccacccgtttcaacccgcgcaaggccttcggcaccgcgacgccgaaggaccatatctacaacacgccgcgtgcctggtacatgcaacgccgcctcaaccccagcgaggactgggattcgccggccgcccgctacacgcccgaatccgacgacatcccgtggtgccgcgtgccggaagacaaggtgagcctcgaagacgttgatttcctgctgtcctcgcacttcgaaggcacgccgtacgacccgtacggcacgaccggcacggcggaatcgcgccaccgttaccgtccgatcggcgtgaaccgcaccggccatatggtggcgattcaggtccgcccgtatgtgccggcggccaatcgcacggtgatgtgggtatcgttcggctccggtccgttcaccgccgccgcgccgttctacgcgaacgtcaacgacacgcctgcctacctgcgcgacaccacgcccgaagtctccaccggcaacctgtattggacgaaccgcctgatcgccgtcgtggccgacgcgcattggtatgagacgaaccggttcatcgagggctatgccgagggcgtgcgcgcgttcggacaccggctcatcgagcgcacggatgagcagttgcttgctcgaagcgatgccgaatcgacggatacgaatgcatggccgctcgatggcggccacggcgatgagaaggatgtgcagggcgtggcggatgtgctcgaagcggccaacgatgagatggccgactacctgcgcgagcacacaaccaagctgctgaacgacgtgctatacacctccagcaacctgatgcacaacagcttcgcgatgtccgaccgttgggccgagtagcaaaacctcgactggggaggtaatagggatgccctgctgataacgcgtcagcagggcaaaaccacaatccgaatcagttaaagccgacgatgcgttcggcgatgagatagccgttgcgcacgatccagcggccggttttgccgggcagattgagcgcgcgggacatcagctgcgagcgcacatccttgccgatggccggagaataggcgtcaatcgcatcccacagctcggttttcttaacgtagttggccggatcgcgcgagagaatcaggaacaccgaggtaacgcacgattcgatcgccaggaagtgaatcatgtaccggtacagcccctccggcaccgtaccgcgttcgggcgtggcctcggtcatcagccgattgacgagccgcaactggtccacacgcttaatcatcacgtcggtctgcacgctctgaccctcgcgcccgatgaagtagtggtagaacggcacatcgaggtactggatgcgcttcacccacgggaacggctggtacgagtaatagaaatcgacgtagaacgtatgctccggcagcttcagcccggaatcgcgcaccacctgcgtgcggaaggtgagcgcatgcatgatgatgtactgcgccagaccgaacttgcccaggtcatcccagccgagtacacggccggcctccatcacacggcggaagttcactacggtcttgtgacgcttggccaccttgtcatacacgtaattggtcaccagcatgtcaatcggttcgtcggtgtcatgctgtgcacgcaacgtggccagaaccgtgtcgatggcctgcgggtcgacccaatcatccgcatccaccactttgacgtacatgccggtcgccgccgcgataccggtgttcaccgcgccgccgtggcccttgttctcctgatgaatcgcgcgtacggcgcccggattggtgcgttccagcttgcgcgcgtactccagcgtgccgtctttcgaaccgtcgtccacaatcagcacctcgaggtcgctgatgtcgcttgccgaaagcaacgagttcacgcaacggtcgaggtaggactccatattgtatgcggggatcacaaaggtgagcgtctttgccgtgctggccatgaaagtcttacgtcctcacatatttagtcgttatgttcagtttcctgttcaaaccgtagcacttcgtctcccgactcggcagagtgttgcgtaacctgtgcccctgaactcatgttctgcaaccctgaatcttccccggtggcgtgctcgggatccgattgggcagaactcgtctggtctgaatccgggctgccggaatcggactcgcgcttggctcggcgctcggcctccttccgcgccttggcgccctcaaagaacaactggggcttggagtcaagccggctcaggccatgccaggccaaatccacaatgtatgcggccagctgctccttgctcacctttggccggtcggcccagtactgcccggtgaatacggtcatgcccaccagcatctgcgcgtagtacggcacgcccttggcagacagcttctgccgtttgaatgtttcggaaagaatgtcttcaacgcgtacggcgatgtctcccatcagcgagctgaatgagccggacgggtcggtgctcggcgagtcgcgtaccagtacctggaacccctcggcattctcttcgatataggtgaggagcgcaagcgccgtgcgttccacaatctggcgcgggtgcacggtcggatcgtcaagcgcggcggtgagcacactggtcagcgcgcgcatctcacgatccacaatgacggcatacaggccctctttgccgccgaaatgctcatacacaatcggcttggagactttggcgtgcgcggcgatttcctccacgcttaccgcttcgaagcctttggcggcgaatagcgagcgtccgacttcaatcagctgctcgcggcgctgcagcgacgtcatacgtgaagaatgtgccatgcggttcagcttaagtcgtcgggtggaattgtcggcctgagactgccgaattcgtaggggattccatctgcgggctagacttgacaggtatggatatgaatactgtgctcgccgttcttggcgtgattgtggcggcggttatcgtaatcgccctgagcatctggttgggcaagtcccgcaagcgcgatttggatcgtgcgatgggcaaggttgcccccgacaacaagaagacccgcgacgccaaggccgccgccgacgctcggctggccgccgaagccgaggaagctaaggctgcgactgccgccgagccggccaagtcagcagaatcggccaaagccgagcctgcgccagccgcgcaggccgaacccgaaccggcagctgcgcccaagcccgagtcccaacctgcctccaagcccactcccgccaaacctgaaacccccgaatcggtcggctctcgactgacccgactcaaggcaaaacttgccaagtccggcaacccgttcggcaaggccctgttcgacatcctcgccaaagacaatctctccgaggccgattgggaagacgtcgaagacacactgctgcttgccgacgtcggtgcggatgcttccgcccaactggtcgatgacctgagaaccgacgcccgcatcactggtaaagccgacccagctgaagtacgcgccacgctcaaggagaagctgctcgatctggtcggtcgagatacggaccgccgcctcaatgccgaaaagccgggtgccgccaagcccagcgtcatcatcatggtcggcgtcaacggcaccggcaagaccaccactgccggcaaactggctcgactgttcgtggccgaaaacaagcaggtcatgatgggcgcggccgacaccttccgcgcggccgccgccgaccagctcgaaacctggggcgcacgcgtcaatgtgcccgtcgtccgctccgacaaggacggtgccgacccggcatccgtcgcctttgaggcatccgccaaggccaaggaagcgaacgcggacgtgctcatcatcgatactgccggccgactgcagaacaagtcgaacctgatggacgagctcggcaagattcgccgtgttaccgaaaagaacctgccggtggatgaagtgctgcttgtgctcgacgccaccaccggccaaaacggcatggcccaggccaaggtgttcgccgaagccatcggcattaccggtgtggtgctctccaagcttgacggttccgccaagggcggcatcgtgatcagcgtgcagaaggagctcggcgtgccggtcaagctcgtcggtcttggcgaaggtccggacgatttggcacctttcgatcccgaaggtttcgtggacggcattctcgcgtagacggtcgagctctcctcagtctcgctttgctcgacagttcccctcagcgaggggagccctgcgtccgtccacgttgtgggcgcgggaaacgcccgcaacgcaccaaacctagccccgaatcatattcgaaacatgattcggggctttcccatatccgttggaatcatgccggaaccagcccatccgataccaacctaactgtcaggtgcgcttaacaatcgcgtaacttgccgtaacgaaaccaaaacgagaccggcttttactgacgaactgttagcccccacaagggggacggcattgtagagacaaagtcgacgccggccgcgcaaagcccccggtgccctgaacgaaagagagggaggtagacatgggagcgattgattccggtaacaccgcatggatcctgacatccgcgtccttggttttcctcatgacgcctggtgtggcgttcttctacggcggtatggttcgtgccaaggccgtcctgaacatgctgatgcttgaggcggccgccctgtcggtcaccatgattatctggaccctgtggggttggtcgattgcttacgccggttccgacatcggaggcatcttcggcgacccggccagcggcttcctgctgaaggactccatggtcgcccaggacggcgtgttcaccgccaccggtctgaacggcaacaactacccggtttccgtggacgtcgccttccaggtcgctttcgcgatgattaccgtcggcctgatctgcggcgccattgccgagcgtgtgaagtacagcacctggatgattttcgtggcgctgtgggtcaccttcgactacgctcctatggcccacatggtctggaacggtggtctgctgtctgctgacggcgccatctccaaggccatcggcgcggccgcccacgatttcgcaggtggtactgtcgtccacatcaacgccgcagtcgccgccctgatcatcgtgctcatcatcggcaagcgtaagggcttcggcacgcagccgttccgcccgcacaacgtgccgttcgtgatgctcggcgccttcctgctgtggttcggctggttcggcttcaacgctggttccgccttcgccgccaacggtactgctggttacgcttgggtttccacctccgccgccaccgcagccgcaatgctctcttggggcttcaccgagaagattcgctccggtcactacaccgccatgggtgccgcctcgggtatggtcgccggcctggtcgccatcaccccggccgccgatgtggtttccccgctgtgggccatcgtgatgggtgccatcgctggtgtcctgacctgcctggcctgcggtctcaagttcaagttcggctacgatgactccctcgacgtcgtcggcgtgcatggcgttggtggtttcaccggcaccatcctcatcggcttcttcggtgaaggcaccggtctgctggctggtggcgactggaagcagctcgtcgtccagctggtcatcgctctcgtcgccatcctctactccgcagtgatcaccgcgatcatcgccttcgctctggagaagaccatcggttggcgcgtcaccgaagctcaggaagtcggcggcatcgatcttgccgaccagggcgaacgtgcttacgattttgctggtactgccagctccgttctcaaggaggtgaagtgaaatgaagctgatcaccgctatcattcagccccataagctcgacgatgtcaaggaggccctcgcggccgccggcgtgcacggtctgaccgtgtccgaggccaacggctacggccgccagcgcggccacaccgaggtctaccgtggcgctgaatacactgtggacctgattccgaagattcgcgttgaagtgctgtccgatgacgcggatgctgaaacgctggtcggtgtgatcatcaagtccgccggcaccggcaccatcggtgacggcaaggtgtgggtcgctccgctggactccgtggcccgcgtgcgtaccggtgagaccggttccgccgcgatctgataacacagacgtccatgcctagaaggggatggactgcataggaaaggtccccgcacgccgcgaattgacgccgtgcggggactttttttggcaatgaaagatgaagcaatgacttcagcagtagatggcttgaaacaacgattcatggatatgagccagccggatgacgacggcgtctaccggaatggtgcgaccaagcgcaaagcccgcacggaactggccatgcaatgcctcactgagctgtggaatgcggcctgcaaggatgtctctttccccgtgcccgactccggcatcggcttcgccgcggtaggctcgctggcacgtggccaactgggccccagctccgacctcgacctggtcatcatctacgagcctcgcacgttgaacgaccagcagctcaacgagttggccaacaaactctggtacccgctatgggacagcggtctggacctcgaccactccatccgcacgcgcgcccaatgcgaggaggtcaccgaccatgaccttcccgccgccatgggctggctggacgtgaagcccatcgccggcgacaccgctctgatcaccaccaccgccacatccatcctcgaacgctggcgcaaggccgcccgcaagcgcctgcccgaactgctcgactccgccaaagcccgactcgacgaattcggtcggctccaatacgtcaatcagcccgacatcaaagaggcccgtggggggttgcgcgattcggtgctcgtctccgcgctcgccgcctcatggctggccgaccgcccgcacggcatttacgacgaagctgtggaacgtctgctcgacgtacgcgactgcatccatctggtggccggcaaggataccaacctgatgctgacgccctatcaggccaaagtggctgccatgcttggccttgccgatccgacttggcccgaaaacgagcgtgccgcctactcgatcgacgatctgcagacactgcttgcccgtatcggtcggcgcatctccttctcgcttgattccaccgcttcccgcgccgaacattcgctgacccacgaaaagccgcgattcgcgttcttccagatgttctctcagcgctctggtggcaagcgcgaagccccgcaattcgacgtggtggctcccggcgtggccaagcacgaaggcgaattggtgttggcgcccggtgccgagcctgccaaggatgccaagctggcgttgcgtatggccgtggcggccggcgaattcggtcttcccatcaacccgtctaccttggttaatctgaagcgctgcccgattcacgacaaccagtgggatgacgaatcgcgcgagctgtttatccgtctgcttgcgtgcggatcgaatcttatggaagtgtgggagagcatcgatttcgtggacattccgggtcgatggatgccggaatggctcggcgtccgcaaccgtccgtccgcctcggccgcccaccggtacaccatcgatcggcatatggtggaggtcacgtcgcgtctgggtcgtgagacaccgtccggtggacggtacgatgacgatcatttcaaggcattgctgttggccggtatcacccacgacatcggcaagcgcgcgttcgtggccgatcacgccgccgagggtgcccgccatgtgccggtgattctcaagcgtatgggctacgcgccggacatcgtcgactgggctaccgtgctggtgcgtgagcatttgacgctatccgaatttgccacgggtaaggacccctatgatccggccgtggcggaggagttggccgaccgcttgcaccacgacaagatgctgctggatatgctgttcgacctgacccgggccgacggctcctcgctcggtgccaccgccggtgagaccatcaccaagcaatacggctggtccaagtggcgcgaacaaatcgtccgcggcatgtattccgccgcccgcgccgctatgtaaacggaatcgcccagcgcttcgcgcggccgatacctacctcatccatgcgtccgagcgcacgcgtagtccgttggacagaccgcgcccacccatgagcaccacgttgaacgcggcccagagtacggcggtacgcatcaggtcgctcgtcagcgccggcgtcaccatattggccagtatgagtatgagcgtcacatacaccacggcggtcagcgtgcatgtgacggccagatagcggtagtcgcgcgcgccgataagaatgccgtcgattgccatcatccagccttgcagtgggaagaagatgcccatcgtcaccatgcccacggcgatcagcgtctgaatatgtggcgtaggggagaagaagtgcccggcgaacaggccgactaccgcaaaagccgtgccgattaccgcgccggtgaccagtcccgcacgcccggtcgcccgcgtcagccgccgcgcctgctgcacgctgccagcgcccagcgctgtggccaccagcgtctggccggcgatgcccacggaatccagcatgttcatcgcaaaattccaagaggagttcacggcctggaacccggccaacacggcagtacccatgcgcgcggcacaggcgaccgtagtcaccatggccgcacgaatcgccaatgtgcgaatgaacaatggcagtccgtcgcccccggctgccgcaataccggccaaacgaggccgcagactcgcaccatccgcccgggaccacagaatggcggggattaccaggaacagccccatgaaccactgagctaccagcgtcgccactccggagccggcaatgccccaattcagcacaataacgaacaacacatcaagcaccgtgttcaccaccgcgccgcccaccgcagcgatcagcgtgatacgaaccttctgcaatcctcggaaaatgccgttcgccgcatataccatcagcatgcctggcgcacccagcacgattgcgcgcgtataggtcacggcttgttccaatacttcgccctgaccgcccagtgcccggcataatggctcggcagccgcgaacaatcccaatcccagtacggtgccgatgctcaaggccagccacaggccgtcaatgcctgcctgcagtccctcgcgacgacgacccgctcccagcagatgtgccacctgcgcagtggtcgagtaggccaggaatatgcatagtccgactgccgtgaggatgatggtggagccgattgacaggccggccaacgccgcatccccgatatggccgacgatggctgtgtcgataaggatgaaggtcggttcggcgatgagctggccgaaggtcggcagggccagcgccatgatccggcggttggtggagcgggcgtcggtcgggccgttgctgacgtttgtgtttgcgccggcatgcggggtgccgaagccatcgcggcgtgtagtatcgccggaactggtggctttggcgtcggaagagtctatgggcacgctcacacgcatatcacgcctgactgcgttgcgcaagcacctgttgtgggcgcggaatgttatccccagactatccaccaagttatccccagtatgtggataacttagtggattatccccagaattatccccaaaatgtggataacttatttttctatccacattttgctttctgcgtgtcgtggcgctgactcataggtgaataaggaatgaaccgatgcgggcaaccgtttcgtttccatacgatatcgttcacctgccacgccacatcctatacttggaggctatgccagaaggaagtgaacactcgtatcagaatgggttcggcggtggcctggatcgtggcgatcgtggcgaccgcgcgggccggggcggcacgcagacgtcggcggcggccggcgacccgattttcgaccgcgtgcccccgcatgatgacgacgcggaaatggccgtgctcggcggcatgctgatgagtaaggatgccatcggcgaggtctcgcagaccattgacgtcaccgatttctaccagcccaagcatcagacgatctataacgcgatcatcgatctgttttccgccagtcagccggtggacgtggtgctcgtggccaaccagctgttggcggatggcaacctcgacaaggtcggcggcgcggactatctgcacagccttgtcgcatccgtaccgaccgccgctaatgccatgtactacgcggagatcgtccatcagcgggccattttgcgcaatgtgatcgccgccggcaccaaaatcgcccagctcggttattccgccgagggatcgcaggctgaggatgtggttaacctcgcccagtccgagatctacgagatgtcgatgggcaaggtgcgtcaggactatgccgccatcggcccggtggtccacgacgcgctcgaccagctggacaaactgcagcaaggcctcgtcaacaagggcgtgccgaccggcttccgcgacatcgacgacgtgacccagggcctgcagcccggacagatggtcgtcgtcgcaggacgtccggccatgggtaagtccacgctcggcatcgacttcgcccgcgccgccgcgttgcaccacaacatgacttccgtggtcttcagcttggagatgagcaaggtggagctcgctcagcgtattatctccgccgaaaccgatattccgatggccgccctgcgccgcgccgacgacatcacccccgaacgctggaacaccctgaaccggttctggaccaagatgcagaacgcgccactgttcattgacgacagcccgaacatgagcctcatggagatccgtgcgaaatgccgtcgtctgaagcagaccaacgatctgaaactcgtagtcatcgactacctgcagctgatgacctcgggcaaggccgtggaatcccgccagcaagaggtgtccgaattctcccgtgccctgaagctcttggccaaggaactcgaagtgccggtcgtggccctttcccagctgaaccgtggcccggaaatgcgtaacgacaagaagccgcagctctccgatttgcgtgaatccggctcaatcgaacaggacgccgacgtggtgttcctggtccaccgccctgacttctacgacaaggaagaccgccccggcgaggccgatatcatcatggccaagcaccgtaacggcccgaccgaaaccttccacctcgccttcctcggtgccacgtccaaattcaaggacatgccgcaggactacaacgccaatcagggggtgtgatgatggcaagcaacgtttcacgcgatgtttcgcaagaccaatcgtccgtggtgcagacctgcaaaccgtggtatgcgttcgccaccgtggccgcaggccgcttcgtgcggtttgcatcccgcgtcaccaaacatggcggttcggctttgcccggcaaagtcgtagaaaagattgaccccggcttcctgacccgtacgctcgggcagttgccgcttggcgtggtattggtgtccggcacgaacggcaagaccaccaccacccgcatggtcgcctcgatgctctccgatctggggctgaaggtgttcaccaatccgaccggctcgaacttcgtgcgcggcgtggtctccgcactgcttaccgaagtcacgctcggcggcaaattggacgcggacatcgccgtgctcgagctcgatgaggcgtacgccgtccacttcgtcaagcaggtcaagccccgttatgcattgctgctgaacgtgatgcgcgatcagcttgaccgattcggtgaaatcgacaccacggccaaactgctcagccatgtggctgcggcgactaccggcactgtggtactgaaccgcgaggacccgcgtatcgccgcgctcgccgcgaaggccccggctggcaccaccgtgcgatacttcggcctcgccgacgatttgcgccgctatttcccgtccgatgacgacatggccacgaccgtgtcggtggaaggtgtggccgggccgctcccctcagccagaactcccctcagtccgcgaagcgaactgagaggagcttccgcaggcacggcagaacttcccgccgacgtgacacttaccgcagtgggcgaccacaaggccaccttccagatggacggtcagggctacgccaccgacgtcaagcttgaaggcgtctacaacctgtacaacgcggccgccgcgctcgccgtggtacgtgcggtgatgcaagacaatgccgccgcatccaaggccaccgccgcagccaacgcctgcgccgtgtccgccgacgagctcatcgccgccgtttcccgcgtcacgccggctttcggccgtggcgaggtcatcgacgtcaacggttccccggtcgaactgctgctggtcaagaacccgatgggcttccgcctctcgctcgccagcttcgacccggccaacgcggacaccatgatcgccatcaacgacgaatatgccgacggccgcgacatgagctggctgtgggacgtggacttcacttccctgcgcgcgtccggtgtcgccatggtctccggcgtgcgtgcctgggacatggcattgcgcctggggtatgaccaagtgccagtcgccgatacgaacaccgacctcgaacaggccgtcaccgcattcgtcaacgccaatcccggcacacgcaagcacatctactgcacctacaccgccatgctcaaaacccgcgccgtactgggccgcatcaccgaagtacgggacgcgggcgtgggcaagtaactatcctctagcgcccgcgcgccacctcccgcctgcgggaggacatggtgaggaataagacgcttcccgtcagcgggaagacatcgacaaggagaacgtgacatggccagaacaattgatgtggtgtccctgtatcccaaagacatgaacatctacggcgattccggcaacgtgctgactatccgccgccggctggaactgtacggttacgaaccggtcgttcaccagtacaatcaaggcgacgattggcccgaccaggtggaccttattctgggaggcggcggccaagacaccggccagaagaaaatcatcgacgacttctaccatcgcgccgacctgttgcgttcgcttgccgcagacggtacgccgatgctgatgatctgcggcctgtaccagctgttcggcgagtactttgaaaccgtggacggcacccgtctggacggcatcggcgttatcggtgcttataccgtgggccagaacgtgcgtatgatcggcaatcttgttgagcattccgaccagttcggcgatgtgattggctacgagaaccactccggccagaccttcctgcgcgaaggcgttcagccactcggcaccgtcgatcaggatggccgaggcaacaatggcgaagaccataccgagggcgcgcgcgtgcacaacgtgatcggcacctacatgcacggctcgttgctgcctaaaaaccccgccatcagcgatttccttatcgaaactgccgtgactcgtcgttacggtacgttcgatacgtccgatcagacccccgaacaagccaaggagcttgcccggctcgatcaagtagccaccaacgcgcgcaaggctgccgccgaacgtcctcggtgaattctcggtgagtcctcggtaagtaccaatcagcgaaaaatcagtcgaaatcagtctgagggtctagtacattgccctgttgtttgcgctaggcttggtggtacgagacatggcaccaggccatgtcggacctcgaaggaggggtatcatggctgattttgatcttctgggtgatggcctgcgcaaggtcctgctggcgggcatcggagcccttgccaccggatacgagaagagcagcgagctcgtcgacgaactcgtcaagaagggtgagattacggtcgagcagggcaaggcgctgaacaccgagctcaagcgcaaggtgagcgagacggtggatgacgccaagaaggccgccgccgaagccggcgacaaagctgctgccgcagccgacaccagtgccgccgacaagcccgctgacgagggcaaggccgagtgaccaagcccacacgcgctacgccggaatcagggtcgaccccgctttccagcagggtcgaccctattctgacgcctgcgaaagccgaacgtgaggcggcggcgaaccggtccgtcgacacgtcggacacgctcaagcagaccgttaccaaggcgactccgagcgtatccgacgaaacgctggcactgttcggacgcaggaacgatttcgccacgcgctaccatctgacgcgtcgtggcaagatcaaacgactggggcagatcaccagaatcgtcgagcaattcgacgtgctgcacggcctgactccggtcaaaatgcgcctcatgttcgaggcgctcggccccacgttcgtcaaagtgggccagattctgtcgatgcgctccgagattctgccgcaaagcttctgcgacgaactcgccaaactgcgcgccgacgccgacccgatgccgtattccacggtgttggatgtgcttgccgccgaatacgggcgtcccgccgacgaggtgttcgcgcatatcgaccccaagccgttgggctctgcttcactggcgcaagtgcatcgcgccacgctgaaaaccggcgaagatgtggccattaaagtgcagcgcccgggtgtgcgcgaaaccatggcccaggacgtctccatcatgcgctccatagccaaggccgccactaaggtgattcgcacctcacagatcgtggacctgaagggcgtggtcgaggagctgtgggacaccttcgaatcggagactgactttctgattgaggcccgcaacctcgccgaattcaagcgtttcgccgcccgattcaaatacatggactgcccgacggcgtacaccgaactgtgcaccgagcatgtggtggtcatggagtacatcgacggcatctccgtctcccacccgggccggctcgtcgatgctggttatgacttgaaggagatcggcaccaagctcgtcgacaattacgccacgcagattctcgacgacggcttcttccacgctgacccacatcccggcaatatcatcatccggggcggccagatcgtacttatcgacctcggtatgaccggtcggctcgaccagcgcacccgtgcagtcctcaaagaaatgtttttcgccgtcgccaaacaggattcgcccgctctggccgaggggctgctgcgatttgccggcaccgaggccgatccggaggactacccagcactgctggctgatctggacgtgatcgtcaaggaattcggcaccgtggatctggccgaactggacattgccgccttcctgaccgcactgacgcagatggccggccgccacaacatcgaggtgcccagtacggtgaccaccgtcggccgcgcgttggttacgctcgaaggcttgctggacgagttcattcctgatgtgaatatgatcgaaatcatttccgaccatatcgccacgtcgaaatcgctgaagaacgccaccaaagacgagatcaagtcgctgggcgttgagggacatcaggctttgcatgccacgctcggcaccatgaccgaactcaagaccgtggcccgtatgctgacccgtggtcagttgcgcgtcaacatggaactggtcggctctgaagagccgttccagctgctttcggatatggtgaatcgtctgacgatggccctgattgtggtcggtttgttcgttggctcgtcgattgtctactacgccggcatgaagccgattatcttcggcattccggtcatcggcttcatgggctacgtcgtggccttcgccctcggcgtatggatcgtcatcgacatctacttaaaggggcgcaaaaccaagaagcggtagggcatcgattgatatcagtccagcgggagggtggattcgcgctggataaggtggcagggtacgtagtcgacaccgtgatgcgggttgccgtcgatggcatcgaccaagtatcgtgccgcacgccgtccgatggtttcggtttcgttgtcgatcgacgtcagtgcgggcctcgagctggaggtcagtaccgaccagttatcgtggccgatgacggcgacgtcatccgggatgcgcagtccctgctgcttgagcacgtcaatgcagccgcgggccaactgatcgttctggcagaccactgcatcgaacttgaccccttggtcgagcagcaggcgggtggcggcgcggccccagccttcgtcccatttgccgtaacgaattgggccggcgggttcaatacctaattcggagagtgcctcgagcgcgcccttggtgcggtcggtggcagcggtataggtttcgtcgccgccgataatggcgatgtgccggcggccacacgagatgagatggttgatggccatgcggccggcgtccacgttgtcgcaagtgaccgagcagtctttggggtcggtggaggggccgtagacgtagaccagtggcacgccccagtcatggccaagcgtgggcctggggttggtctcgcactgcacgatgagcagtccgtcgaccttgagggacagcagtttctcgacatgctgacgttccaaggcggcgtcgccacgagcgttggccaacaatactgaggtcgattgggctcgcaactcgttctccgcgccgataagaatcggtgtggagaaacgaccctgcagatcggaggtgaccaggccgatagtgccggtggtgccgcgggctagggattgagcgagtttgttgggagagtagttgagttgcttggcggcatccagtacacgctgcttggtttcttcgctgatacggggtttgttgtgcagtgccttggatgcagtggccgtcgagactccggccaatgccgccacatcctcaagtcgcgctgcccgtccggttgctggctgggtcatcatgcctcgattccttggttcttcagcagtatatagcgcattgttttgcgatgaaatacctcatacggtgtggtgcgccattgcatctgggaataattgtagcttcaatgcgaaaactttcgcaaacatctttttttcggcgtggcgtagtcagggaaattgttcaagtgcaaggtaagtgaaagaaagcgttacttccatgttcgcttttgtttgatttgctcgacacgccggaataatcattgatattaagccaattcaagcacgttattcatagtcgaatcacagtctcgaacccgtttgatgtgagaaaaaacgcgaaaatgcgaaagcgcttttgcaaaaacttccatgttcgtttatattgagaaaaggctttcgcagtgttacctgctccgggcaaaggagcgagcagggcgaaaccaaggaggcggaccgtccgccaccgcctctcatagttgagcggatatatagagaaagaagcgaacatggtgtctttcaataaactgacccgtactcttgctggcatcgctgccgccgcgttgatcgttccgctggccgcctgtggtggctccggcaatggtggcactgccaccgccgaaggtatcccggccaagggcaccgacgatggtaccgagatcaccctgtggacccgttcccctctggagcgtcaggccaagaacgtggtcgaggcttacaacaagagccacaagaaccaggtcaagctcgagatcatcccgaacgacgatatggaaggcaaggtcggcggcgcttcgcagaccgactccctgcctgacatcctcgccggcgacgtggtccgtattccgtactgggcttccgagggcatcttcaccgacatcaccaagcaaatcgatggcctggacaacaaggccgacctgcagcagggccacatcgaagccggtactgttgacggcgccgagtacaccctgccgttcatcactgacgtttccgtgatggtctggaacaagaacctgtacaaggaagccggtctggacccggagcagggtccgaagagcatcgaccagttcgtcgagcaggccaagaaggtcgccgccctcaacaaggatggcgtcgcaggctcctacctcgccggtcagtccggtggtgctctggtcttcgacctcttcccgtccgtgtgggctgacggcgaatccgtcatgaacaaggatggctccgaggccaccctggacaacgactccatgaagggcgtcttggacgcttacaaggagctggccaacaccaccaacggcctgggtgcaggctccaaggaagagaccggcgccacctggaccgctccgttcgcgaacggcaagatcggcgttatgccttacccgaacacctccaccactgctctgttcgatgctgagaaggacggcggcttcgaggtcggcgttgctccgatcccgggcaccaaggaaggcaagacctccacgttcctcggcggcgatgccatgggtatctccaaggactccaagcacgttgctcaggcctggaacttcctctactggctgatgcagtctgacgctcagaaggaagtcttcgctgaccaaggcgacaccgcctccaacatccagaccctgaagaccgcttacaaagacgctgacccacgcatccagaccatcaactccgtgattatcgacggcaacggccagaccccgaagtccccggccttcaacgaagccttcaacgccgctggctccccgtggcagctgctcgtgcagaacgccgtgtggggttccggtgacctcaaggccgacaacaaggccgtcaccgacgtcctgtctgcccagtgattcggtggtgatgctcctcaccatcactcatcaaatcacagcaataactgaataacaactgaacagattgagccggtccctcccttgtgagggcaggagccggctcaaccacataatcgaacttctatcttcttcttcattccttctcttccttcatcactacataccttatgaatgcggtgtgttggcggggcttcggagtcctccttcctcgaagccctgacatcggattgcattcggattccgtgattaccatttcacagtaatttcccaaaggagagagaaacatgtcgagtgtttccaagagcgccggggctgtgcccgtgcataagtccaaggcgaaggcggcgcagaccaggcgaggtctgctgtacgcacttccggactggctgatgattatcgtcctgttcttcgtgccgattgttctactggtcgtcatggcctgctctcgttggagcctgctgggtggcaaccgcggcgtgaacttcccggacaacttcgtcaaggtgttcgagaacaaattgttctggccctcgatttggttcacgctcgagtacaccgtgatcgtcacgatcttcctgttggtccttggcctgggcatggccatgatcgtgcaggagagctcgaagtggaacaacgtgctgcgtacctgcttcctgctgccgtccgcgacgggcctggcgtccgcgtccctgctgttctacgccctgtattccccgcaggtgggccctgtcaccaagattctgagctcgttgggcctgatgcaggagggtggttcggtgctggccactggccagtcggccctgtgggccacgattatcgtgattgtctggcgtttctcgggctactacatgctgctgatgatgatcggtctgcaggccatccccggtgatctgtacgaggcggcccgcatggacggcgccggttcctggcgtatcttccgctccatcaccctgccgctgatgaagccgaccatcgtgatgtgcctggtctactgcgtgaccggctcgatcctcgcgttcgatcagttcttcattctgaccaagggtggtccgaacaactccaccatgaccgtggtgcagctcatctacaacttcgccttcgattccaagaaggatctgggtatggccgcggcgctctcgctgatcgtgctggtggccctggtcatcatcaactccatccagatgcgcggcatgcgcgacaacaccaagtgagaaaggggaggtaacacattatgactaccccattgtggaagcgtatcatcgcccggatcctcgaggccctgctggccatcatcttcatcagcccgctggtctgggtcatcatctgctcgttcagcccgcaggccggttcggcccagtccaagggctggggcgtggccaactacctgaccctgttcggttatcaggaaggtctgcccaagtacctgttcaactcggtaatcgtgactctggtcgcggtcgtgttctccgtggtcgtctgtacgctggccggctactcgttctcccgcttcgactacccgggccgcaacctcggcttcatggtcaccctgtcgatcctgatggtaccgtacgcctcgctgctgatcccgctgatggtctggtacaagcagatcggcctgaacgacagcctgctgggcgtgggcctggtcatcaccctgttccagctgcctatgagcacgttcatcatgcgcaacgcgttcgacgcgatccccaaggacatggaggaggccgccatggtcgacggctgcaacagcctccaggccttgttcaagattctggtgccggtggtcaagccttcgatggttacggttggcctgctcgccttcctcgaggcatggaacaacttcatgattccgctgtacttgagctcttcgtccaagtccacgctgccgctggcgatggtgaacatgcgtcagcagaccatgggcgtcatcgattacggtgccaccgaggccggcgtcgtgatcctgctgattccctgcgccatcctgttcctcgcactccagaagtactacgtcaagggctttatggctggagccgtgaagggctgatcatgaacgttacaatcacttccccgttctggaagcggcgtcgcgaccagattgtcgaatccgtcatcccctaccagtggggcgtgatgaacgacgagatcgacaccacggtgcccgacgacccggccggcaaccagctggctgacagcaaaagccatgcggttgccaacctgaaggttgccgccggcgaattggacgacgaattccacggcatggtgttccaggattccgacgtctacaagtggcttgaggaagccgcctacgcattggcataccacccggatcccgagctcaaggcgctgtgcgaccgcacggtcgatctcatcgcccgcgctcagcagtcggacggctatttggacactccgtaccagatcaagtccggcgtatgggccgaccgcccgcgcttcagcctgattcagcagagccacgagatgtatgtgatgggtcactacatcgaggccgccgtcgcctaccatcaggtgaccggcaacgagcaggcccttgaagtcgccaagaagatggccgactgcctggatgccaacttcggccccgaagaaggcaagatccacggcgccgatggtcatcctgagatcgagctcgccctcgccaagctgtatgaagagaccggtgagaagcgttatctgacgctttcccagtatctcatcgacgtgcgcggtcaggatccgcagttctacgccaagcagctcaaggcgatgaacggcgacaacatcttccatgatctcggcttctacaagcccacctacttccaggccgccgaacctgtgcgcgaccagcagaccgcggatggccacgccgtgcgcgtcggctacctgtgcactggtgtggcccatgtgggccgactgctcggcgatcaggggctgatcgacactgccaagcgtttctggaagaacatcgtcacccgtcgcatgtatgtcaccggcgcgattggttccacccacgtgggcgagtcgttcacctacgactatgatctgccgaacgacacgatgtacggtgagacctgtgcttccgtggctatgagcatgttcgcccagcagatgctcgacctcgagcccaagggcgaatacgccgacgtgctggagaaggaactgttcaacggttccattgccggcatctcgctcgacggcaagcagtactactacgtcaatgcactggagaccacgcctgacggactggataacccggaccgccaccacgtgctctcccaccgcgtcgactggttcggctgcgcctgctgcccggccaacatcgcccgactcatcgcctccgtggaccgctacatctacaccgagcgcgacggcggcaagaccgtgctgagccaccagttcatcgccaacacagccgaattcgcttccggcctgacggtcgagcagcgttcgaacttcccgtgggatggccatgtggaatacacggtgagcctgcccgccagcgccactgacagctcggtccgtttcggactgcgcatccccggctggtcgcggggctcctacacgctgaccgtgaacggcaagcccgcagtgggctcactggaagacggcttcgtataccttgtggtcaacgccggcgatacgttggagattgcgctcgagctcgacatgtccgtcaagttcgtgcgcgccaactcccgcgtgcgctccgacgccggccaggtggccgttatgcgcggtccgctggtctactgcgccgaacaggtcgataatcccggtgatttgtggaactatcgtctggccgatggcgtcaccggtgcggatgccgctgtggctttccaggccgacttgctgggtggagtcgataccgttgatttgccggcagtgcgcgagcacgccgacgaggatgacgcgccgctgtacgtggatgccgacgaaccgcgtgcgggcgaacccgcgacgctgcgcttggtgccgtactactcgtgggccaaccgcgagataggcgagatgcgtgtcttccagcgtcgataaatatcggcgatatgccggcctgcgcgcaactggccggcaaaaaaatacttatgccgccatcgtctgtaataagtcgatgacggcataggccggatgtcagtatcgattggagccgaaaacacatccggggaatgaggtctcctgtgcggggtaatacccgtgcaggagattattttttaattatatgctcctgctgtgagagctgtcggcggagtcgactgagggtggtcataagcggtaccgtgtaagccaccctcagtctcgctttgcgagccagctcccgccagcgggagcctgttggttcctgattcagcgaggctgaatcggcgcgccgtaggtactgcgacacggcgaaacgcagcaatgctctaatgcgaaagtaaatgcgaaaactgagaaattgccgggtttttgttgtgtaagatggttgatatcgctgagggaaagttgcgaaaccgtattcgctcggttatgatgtggaatcagcttcggtgaattgctccaaccgtgatatccatggcggatatcacaccagattcactgaagatactcattccggtgaacccaatagccaataaaggaaactgacggagaacgggctctgcggcccagcatccacagaagaagtcctggtcgcatagatgcgacgtagcctgagcgaagacgcgaaagaccggggcggagaggtccaagcaggaatgcatcactcaacacgaaagcggtggcttgcgtcaatcggcgcggttgcagcggtcgccacactggccaccggcggtgcagtcaccgcgcaggcagccgatgcgcccgtcatcaagaatgcggatgtggcatatccgtcgttcaagggatctgatgatccgatgaagacggcggcgaacaacaccacatataaccctgccgtcagctatctgcaggagacattcgataacgacgtgaagaacctggccggcatcgacaccgaccatgacttctggatcgataagattctcacccgtactggtgcacagccaactggtaaaggcacgaacgacaagggtgcttactcgtatgaaggctccgacggcaacaactacctgttcacccgtggtcgcgccgcctacatgtacacgcacacgcctaatcagctcggttttgtgggtgataccgcctactgggaccagaccagcaggagcggcttcaccgttaccgtaaacgctgatggatcaaaccagacccttaacgaagacgcctcccagcgcaagcagacgccgagctacttcacctccctgttccagaccggtggcaagagcctcaagatcaaggaagtcaagtacatcacctacaacaacgtgatggttgcgaacctcaccgtggaaagcacgcaggaccgcgatgtcacactgaccacggcctcgccgttcgccgccgagggtgctgatggtgccaccgaacttactggccgcgtgaacgtcaagaacaacctgacgaccatctatccgcgcttctccgccaacaaccaggacggttccaactggatcgtcagcggtggcaaactcaccagcacgttgagcctcaaggccaacgaaccgcagaccgtcaagattcagctcggcctgatcgccaacgaactgcctgactccaccaaggaatatgaggcccgttacaccggcgaccttaaggatgctgccgcctcctacaaggattccgtgaccacctacaacaagtggtgggtcgataacgctccctacgtggacactccggaagacaatatcgataagaccgtggtctaccgctggtggctgagccgtttcaacatgctcgacgccaacatgcctggcaacaccttccagtacccgacctccatcgagggtgtgctcggctacaacaaccaaatcgtgctcacctccggcatgttcatgatggacaccaagtggttccgcaaccccgagtactcctacggcacctggctttccgccggcgataccgccaagaagagcaaggcgggctattactactaccacgacaatccgggcgacccggccaactggaaccatagctacacgcagtacatcacgcgcgccggctgggactcctacaaggtgcacggcggtccgtccaccgtggccgaggagctggccgaccagggtgccgaggacgtgcaaggtctactcgcttccaagagcgagccggacaacaacgacaaccagaacaacaatgacaacagcttgattgactggtcctggtggtcgatgaccggtaacgatgccgacgccgtttccttctctgagccgggtcgctccggccagcgcatggatcgcgccgatggttccgccaatatgtgggccaacgctaacgcggctgctcaggcatacaaggctgctggcgataccgccaacgccgagaagatgcaggccatcgccgacaagatccagaaagaagtcaccactgaactgtgggacaagtccgacaacctgctcaagcacaagtggctgaacgacggtgctttcgccaagtacaaggagatcaataactactacccgtactccgaaggcctgatgcctaccggcaacgaagattacaacaaggctctgcgcctgttcgaggattccaacgagttcccgatcttcccgttcttcaccgccaaccaggcggacaaggcggcgctgaacttccccggttccaacaacttctccattatcaacgcacagccgctgctgcaggtctattcagccggcatccgcaattacgatgcagccaagaatggctacatcaccaatgagcagttcaagaagctgctgtactgggtggcgttcgcgcactaccagggcggcgataacaactaccctgatcaaaacgagttctggaacgaggacaacaacaacgtcggcgatgtaaacggtgacggcgtgatcaacaacctcgacaagaaccttgacgccgcacagaacggcggcaagatcacctaccgctcctggatccaccacacccagctcggcaccacgaactggacgatggtcgaggacgtagccggtatggtgccgcgcgaggacaacaagattgagctaaacccgatcgaaatccccggttggaactacttcacggtaaacaacctgcgctaccacgatcaggatgtctccatcgtatgggacaaggacggcagccactacggtggtcctgctggctacagcctgtacgtgggcggcaagctcgccttcacctccgacaagctggcgcacctcatctatgacccggctgcgggaacggtcgaggtcaaggacgattccagtgcccaggttaccgtcggcgccgaagccgtcaagaacgtgaaggccgccaatcaggttaccttcaatgccgatcagcgcgtgaccgacctgttcgccaagtccggcaccaacgtcgactccgcctccaagtccaccacgaacgtggccaaggacgcggacgtgaccggtaccacctacgccgagaaggacaccaactacccggccaagaacgcggtggacggcaagaccgtgatggaatcgttctggggtaccaagggctctgagaacaagaccgacacgctcaatatcaagttcaaggacggcaagcagaagatcgacgacatccgcttgtacttctaccagagctcgtccagccagaccatctccggctatgccgagcccgccaactacaagttggagtaccagaaggatgacggcacatgggccccgattgcggatcaggtgcgcaccccgaactacgcgggcgcgaactacaaccgtatccagttcactccggtggagaccacgaccatccgcgtcaccttcacgccgcaggccggcatggccgtcggtgtcaaggagatcgaagcctacaacaccggtatcaaggctgacggcacttccgagaaccagactccgcaggtggatgcttacgtgtcttccagcacctcatctggtgccaagctcgtcggtacggtgaaggatgacggtctgcccgcagaaggcgacgtcaccaccacatggtcccaggtctccggtccggaaggcggtactgcgaagttcgtggacgcctccgctgccagcaccaccgtcaccttcaacaaggagggtgactacgtcctgaagctcaccgcttccgatggcgagaaggaaggctccaaggaaatcaccgttcacggcatcccctctgacggtaccgtgaacgtagccccgcagtcgagcgcctctgccagctacaccaacggctaccagccgaaggacaacgccaagaaggtcatcgacggtcaggtggtatacgccaacacgccgaacgagacctggaacaactggggcgactccactggtgtggagccgtggctgcaactgaagtgggccggcaaggtgccgctgaagaaggccaaggtcttcttctggaccgatggcggtggcgtgccgatggtctcatcttggaagctccagtacgctgacgctgacggtaactggcaggatgtgaaactggctgacggccagtcctacacggtcaaccggaacgaaggcaacgaagtgaagttcgccgacgccgtcgaaaccgacaagctgcgcgtggtcttcccgaagggcgccatcgtgggtgcttccgagttcgaggcgtacgccatcgagccggtgagcgtggacgaagtcaaccgactggtgcagaccggttccaaggctgatgatctgaagctgccatccaccgtgagcgccgtatacaccgacggttctcgccgtgacctcgccgtcacgtggggtaaggtgaccgacgctcagctggccgccgatgccgtattcgatgtcaagggcaccgtcgccggtgcgctgaacggtacggttgcacacatcgcggctcgttccgataccgcatcgcagaccgtgggtaatgcgcagccggttgagcagaccgtctaccagaacgccaagtccatcgacctgcccgccacggttccggtgaagttcccgaacggatacaacgacgaccgcaaggtcacgtggaaggatgccgacatcaaggccatcgacctgaccaaggttggtgactacgaggtggctggtaccgtcgacgacggttcatcttccgcagctgccaagctcactgtccacgtggttgccgacccgaacggttcctccactccggagcctgagcctgagccgttggtcggttggattgaaggcaaggcgaccaggaccaccatttcgcctgattccgaggcgacctggtcaccggccgaaggcaagctcaacgacggcgtagtcgtcgatgatacttggccgaccacggatgatcagaacgtcaacgacaaggtctggggttcttggggcaaggcaaaggacggcatgtacgcccagtacgacttcggtcagtccgtgaccattgaccagagccgcgcccagttctgggccaacttcgctgagactgacgattcgaagggtggtctggaagtcccggacgcttggaagattcagtacctcgccgaggatggttcttggaaggacgtcgagcccaccgaggattacaccgtcgtgcgtaattcgccggcttctcgtgcggataccgatgccaagggttggagcgctgtgaccttcaagccggtcaccaccaagtcgctgcgactcgtgctcactccgtacaccggcagcagcaccttcggggccgccgtggccgagtggggcgtgcatggtattgacggcaccgagcctgaacctaccccggtcgacaagaccgcgctcgagtcggctcttgacacagccaacggcctcgatgcaagccgctacaccgccgcttcatgggctgagttccagcaaatcattgacgctgcccaggctgtgtacgacgatgccaacgccaccgcagaacaggtcgccgagcaggtgaccaagctcgaggacggccagaaggcactcgttgcgctcgccaccgacgtggagaagtccacgttgcaggcggccatcgatgcggccaaagccgaggccgcttccggcaagtacacggataagagtgtcgaggccttgaacaaggccatcgaggctgcggaaggtgtgctcaaggtcggtgaggtcggtgaggtcactcaggccgccgtccaggaagcgtccgcttcgctgaacaaggccgtcaaggccttggaagagaagcccgccgccgaaacggtgaagaaggagtccctcgaggcttccatcgagcaggccaagaaggctgacaagtcgaagtacaccgaggaggcatggcaggctctgcagagccagattgccgccgctcagaaggtgtacgacgacaaggatgccaagcaggccgatgtcgatgccgcacaggatgcccttgacaaggcattttgggccaccaaggttgagcagaagcccggctcccagcagcctggtgtgaccgacactgataaggatgataaggacaacaagggtgatcgtgtgcctccgactggtgccgcggtttccgtagttgctgcggctgccgtgctgctcaccgccgcaggcgtgaccatcctgaagcgtcgccagtccggcgaccacggttcggctcgccactcggcctgacccgcaacggagtcattctgccgagtgagccccctcacagagggggctctagccttttccttctacccatcattactcttttcactcactcaatgaggagcactatgagtttccatgtatccgcgcaatcggttcgcgcggtggccggtggactcgtcgccgcagcgacattgctgtcaggccttgcccttgcgccgaccgcaatggccgccgattcagccaccgctgacaacgcgcccagcgttgccggtcacgcgtataacgaactgccgtataacaatcctgatgtcaccgtcacccaaatcgacaatagcgcactgcccagctacatgcgcaaccccatcgggcagaacgagggtattgacaccccgaacgatctttcgcagaactactactctgcagatgcatccgcgctgagctatgacggcaaactcttcgtcttcaccggtcacgatgaggcttcgcccgactacggctccttcaacatgaaggactggggcgtatacgtcaccgatgaagacggcctgaatcaaggcaaatggacacattacaagaccatcgccaaggcaggcctgttcagctgggccaccggcgatggcgcgtacgccggccaagtcgtagccgacgataacggcaccccgagcgacacttccgatgattggttctactactacgtgccggtgaaggacaaggcttctgaggcggctggacaggacccgttcgccatcggcgtggccaagtcgaagagtccgctcggcccgtggaaggatgccatcggcaagccgctgctcaccacatcgcaaacccagattgaaaccatcgatccggcattctttgtggacgaggatggcaccggatatttgcactttggtacgttcggcactcagctcgccatcaagatgaagaaggacgccacaaccggccgcacctcatacaccgaggtggaaaccaaggctgatggcaccacgccgaacctccacaccatgaaggacgcggacagcaacgcgaacggcccgaagggattcttcgaggcggcgtgggtgttccgtaagggcgatacctattacaacgtgtacgacggcggtaagcccggttcgggcacggccacctgcgtggaatcgaactatcaagcttgcatccagtactccacttccgacagcccgctcggcccatggaagtaccaaggcgtaatcgtgccttctggctcggccaccacgatgcacccctcggtgctccagttcggcgacaaatggtatgtgacctatcacaccggcgacaaggaaggcggcaccgatttccgccgtgccgtgtgcattgatgaagtcgattggaccgccgacggccagatggtttccaccgcccatccaaccaaggccgagaaaacgcagccctccaccaacgtggctccgtacgcaaaggtgagcgccacgttcactgaaacgcctgcttggaagggttcggtgaacgacggccgtgtgttgcaaaccgctgtggtcccgccgaatcactggaccaactaccgttctatcccgcaatcgcagtccggcgattctctggtctaccaatgggatggcactgtgcgcgtcaactcgtctaaggtttggttcgacgtggattccaacgctctgcgcgcgcccgcctcgtggaagattcagtacttggacgcggacggcacatggaaggatgtcaccaacccgagtgcctatacaacgaccacaggcaaggccaaccccaacgccgtcaccttcgatgcggtgaccactactgccttaaagctcgacatgaccggtcaagctgtggatggcggctatgcctccgtggccgttgctgaatgggaagtcggctccgactccagcgaatcgccggcaatcactgcgccgaagagcgtgaccaccgccaccggtactgcgcctactctgccggccacagtggatgtgaagtacgggaacccaaccgttgcctccccagtaatttggcgtccagttgatgcttcctcgtatgccaaggtcggttcgtttacggcctacggcgtggtcgccggcgtgcccggtgaggcaagcgagcagggcaatgtgtcggtaaatgtcaccgtgcaggacggctaccagcctgccgctgataccacgaagccgactgtaaccgttgccgttactgctaacgcaggcaatagcgagtggctcaccaccgctccgttcgccaccgtgcaggccacggacgacaccgcacctatcgccaagctggagatttccgctgatcaaggcaagagctggaccaccatcgacgcgaatgcaaacgcggccattgccacgctttcccagcagggcgatgtcgaagtgtgggctcgcgccaccgatcaggccggcaacgtttccgacgtggccaaggccggcggcaaggtggactccgccgcgccaaccgtgaccgccgccgccgataaggaggagcgcacgctgaccttgaccgctgatgacggcaccggttccggtgtcgcatcaattgaataccgcattggcacagacggtcaatgggccacgtacagcaagccgattgctgcaccgagcgcgtcgcgcgccaccgtgtactaccgcgccaccgataaggccggcaacgtgtccgcttcggcgaaaaccgacattccatccgacacttccgtgccgctgaccggctacattgagggcgatgccaccgccaccgatgtggacggcaaggcatccggctgggtcaagggtgccgccgcgttgaacgacggcaagatcattcccgatatcaccattgccaacgaggatgtctggggcacttggcccaacaccggtgagatgcgcctcgactacgagtgggaccgtgaagtgactatcgactctagccgcgtgcaattcacctcggatgatggcggattgggtattccggcatcgtgggaattgcagtactgggacgccttggcgaacaacggtgccggcaacttcgtggatattcccgacgccacctacactgtgaccgccaattcaccgtctgctggctgggccaccggcgatgccaaggggtggtctgatggcacgtggaacactccggtcaagactaccaagttgcgtatggttatcacgtccggctcggcttctccggctgttgccgaatggcaggttcatgccattgacgacagtacgcctgagccgcctgagcccacaccgatcgacaagaccgagctcaagcaggcgctcgctgactcgcctaaggctgacgatgcctccaagtacaccgagacttcatgggcggagtacgcggcggtattggattcggcgcagcaggtgtataaggctgaggatgccaccgaagctgcggtggtggatgccgcaacccagctgaagcaggcagcgaagaagctggtgcttgtagctacggtgcaagatcgtgccgcgctgagcgctcagctcgatgccgctgctgccgtggatcgcacaaagtggactgatgaatcgctggccgtgcttgattcggcagtcgctatggcgaatgcgctgacgagtgatggtcaggccgcccagtctgacgtacaggctgcgactgaggcaatcagcgatgccatcgcgggtctggttgagaagagcaccacgaagcctggccagggtggcgataagcccggttccggcacggacaagcccaaccaaggcaacgattccaaccagaacaagggtgatgcagactccggcaagcacaagaagatacctgacaccggtgcagccgtgcttggtgttggcatcctcgccgtggtacttgctgttgcgggtgtaatcatcctcaagcgccgcaagtccggtacctgctagtcccactcgctcggcctagcatcaccaagcccccgcgcatgaacagcgggggcttcacttttgttcaataacaagcattatgtgcgcgtatgagactacgatggtggggaatctacgaacaggggcagcaatgacggcatacatggaccataaggatctcgccaacgaagttatcgatcaggcgcgcgcacaagagattactgatggtgtgcatcgcgtgcttgaccggattgcctcagcggagtccgcagccgggcgtgctgccggttcggtccaattgctggctgccaccaagacgcgcgatgtcggcgagattctggcggctatcgatgctggtattcgcgtgattggtgagaatcgtccacaggagattactgtcaaggctgacggtctggcaaaacgactgggggagcgtggttattcgctaggcgtgattgatgccgctgaggctgacacggccaatgccgcagctgcaacgcatattcctttccatctcatcggccaattgcaagccaataaaatcggcaaggtgctgccggtagtggacaccatcgaatccgtggattccatcgaactggcggaaaagatcgcccgccgtgccaccatgcgcggcatcacggtcggcgtgttgctggaggtgaacgaatccggcgaggaatcgaagtccggctgtgcgcccagccacgccatcgacttggcccagcgcatcggtgcgatgggcggactgcgcttgcagggattgatgaccattggcgcccatgtggatgatgagcgcacgattcgtgcgggcttcgcgcatctgcgccgcacgcgcgaccagattattgcctccggtgccgaaggcacggccgactgcaccgaactgtccatgggcatgacccacgacatgacctacgccatcgaagaaggctccaccatcgtgcgcgtcggcaccgccatcttcggcgagcgcgccttcatctgattggagctatacgaaaaaacgccgcttgatcaatagccaagcggcgttttttcgtaaggattttcggcgtatcaatcacgcatagatattgcgcggacgcatgtcctcgggcaggccgtcgagcagaatcgccacggaaccttcctcgaacacggagcgaatacccgcggccagcagcggtgcgcaagacagtacggtcatattcggcaggcgcttctcttcgggaatcggcacggtgtccataaacacgatttcatgcgcgccgcagtgagacaggcgctccacggccgggccggagagcaggccatgggtggcgaccagcgtcaccgacttggcgccggattcgttcagggtgcgcacggcttcgcagatagtaccggcggtatcgaccatgtcgtcgatgaccacgcagtcgcggccgtcgacatcgccgataatgccatgtgcctcggcatggttcggacgagtaatatcacgctgtttgtggatgaatgccagcggcagattgcctagcttggcggcccactgttcggacaccttgatacggccggcatccggggacacgatggtggtgttgcccagatcaagggtggaacgcacgtaatcgagcagcaccggcatggcggttagatgatcgaccggaccatcgaagaaaccctgctcctgagcggcgtgcagatcgaccgtcataatgcggtctgcaccggcggcgtggaacagatcgaaaatcagacgggcggtgatgggctcacgaccgcggtgcttcttatcctggcgcgagtagccgaggaagggcgccaccacggtaatcgacttggcggaggcgcgcttcaaagcgtcgatcatgatgagctgttccatgatccacttgttgatatcgcccgaatgacactgcagcacgaacacgtccgcaccacgcaccggttcggtgaaacgcacgtacatctcgccattggcaaagtcataggacgtggtttcgaggatttcggttcccaaacattcggccaccttctcagctagctcggggtaggcgcggcccgtgaccaatacgagtcgtttatccggagtgccttcaagaatcgccgacatgcgttcgcatcctttgtttgagtcgctgtgtgatttacgccttaaccagtgtacaagcaccccgccgcagcgaacgccacggcggggtgcttatttcgtaagagtgttgagattgccgaaattactcggagaactcgacactgaccttattgtctttgatggtgaagttgccgttgacctccttgccttcaagcgtgtacgtcagctgggcgctcacggtgccatcggcattattggaggtctgcgagatgcgcgcgttggtgatgcgcgtgttctcgcccgaggatgccttgctggtcagcagtgcgcgctggttcgtattcacgtgaggatcggcgatggtgttggccttgtcgtagttgccggaggagatggcggccacatagctgttcgcaacgctcttcgcgctgaacacggcggaagacagcacgccatacacgataccgaacagcacgaggaagccggccacggcaccaacgatgatgaagattttcttctgttgctcattcatggtggtggaggtcgcgccaggtgcggctaccggtgccgctccgggagtgatgggagccgcgggctgcgtgggcttggccaaaacggtggacatcgcgaaaccggcaagaatatgggcataccctgtcccgcctcatatatagactgtccaagttgcccgaagaggcggtgccggtttggtgctgcgtcatgggctaacacgcatacacactcctgccacggaacgtccgtggccgaatagtccgaaggaggtgggtgatgtctgcgcacaagtacgaactgatgttcatcgccgatcctgagctggatgagcgcggtctgaagaagctgaccgagcagtatctggaactcgtcaccaaggaaggcggctctttcgatgagcccgattactggggccgtcgcaagctcgcctatgagattgccggtaagaccgaaggcaactacgtcgtggtgaagtacaccgccgagcccgctaccagcgatgagcttgaccgtgttctgaacctcaacgaatccgtgatccgcacgaagattcttcgtaagggctgaatcaagcgtttagtcagctgaacagctggtattcaaggtaagtaagaaggaccgttatggcaggcgaaaccgtcatcaccatcgtgggcaacctcactgcggaccccgagctgcgcactattggcagcggtgcgaccgtggcgagcttcacgattgcttccaccccgcgaacctggaatcgtcagaccaaccagttcgaggatggtcaggcgctgttcatgaggtgctccgcttggcgtgatctggccgaccactgcgcccagtccctgaagaagggcatgcgcgtgattgccaccggtcgcctccagcagcgttcctatcaggcacaggatggttcccagcgaaccgtcgtggagatgcagctcgatgaaatcgggccctccctgcgctacgccaccgcacaggtgactcgccagtcgtccggtcagggcggcttccagggtcgttccggtggtttccagggtggtcagcagcccaatcagggctatggcaaccagggtggccaaggtggttatgccggtggccagggcggttacaacggtggctatcagggtggtggcgctggatactcccagcagtctgccgctcccgccaacccgtccgctcctgcggtcgacccgtggagtaatgccggtgcatctgatgccggtagcttctccacgttcggcgcttcctccgatttcggcggcgacgattccgacccggagttctgatcagtacttgcctccccgctgccagcagcaatcaatatcaagatttataaggagaacatcatgtcacgtaagaggccgcaaccgccggtcaagccgttcaagaagaagccgaacccgctgaaggccgccaaggtcaccgagatcgattacaaggacgttgcgctgctgcgtaagttcatttccgatcgcggcaagatccgttcccgtcgtatcaccggcgtgaccgtgcaggagcagcgtgagctgtccaaggcgatcaagaacgcccgcgagatggccctgctgccgtacgccacctcgggtcgctgagttagggaggctttgaacaatggctgaaaccaaggttattctcaccaagaccgtgtccaacctgggccattccggtgacgttgtcgacgtgaagtccggctacgcccgcaactacctgttcccgcagggcctcgctttcgcgtggaccaagggcgctgaggctcagatcgtcgctatgaagcgcgctcgtctggccaaggccgtcgctacccgcgaggacgccgtcgccgctaaggccgccatcgagggcactaccgtcgagatcgccgccaaggtgtccgagtccggcaagctgttcggtggtatctccaacgaggccatcgccgtcgctctgtccgacaaggccgcggtgaacccgaaggccatcgaggtcgagaccatcaagaccaccggcgatttccccgccaaggtggccctccacccggagatcaccgcttccttcttcgtgaaggtcgtggccgagtgagtcattccggcctagtgctggaatcacacagaccaagagtctgagcttaagcatcatcccccgtgcggttcgcgccgcatgggggatttttgtattagcgaaaacgccggaaataggcgcgacacgccgagagttgcattcgcttcaaatctgagtatatttatcacctgttgcaaggaatacttcaacatctaaccaagcccctgtagctcagttggttagagcagctgactcttaatcagcgtgtccagggttcgaatccctgcgggggcacagacaaccggaatcgaaagattccggttttttgtttttttcagcatcagtccgtagctggtgcggaaaggccgtcttcgcgcgtgacggccggacgtgtaaggagcaacgtcatgcctcagatattcacgttcaccgtatccgaccccgaaggcatgcacgcccgcccggctggccggttggttgccaaagcgcaggaatatgaatcgagcatcaccgttgcctacggtggaagatccgtggatgccaagcgtatcttcggtgttatgggacttgatgttcaacaaggtgacgaggttacggttcgggtgcagggcaacgatgaagctgtcgctgccgcagagttcgagcgattcctcaaggagcacctgtaatgagaacgatacagggcgtcggcgtatccgctggcattgctatcggcacggtccgcgtgctcgccgccgtagattatgccgtagaacgccgcgtaatcgacgacccgcaggccgagatggatcgattccgcgcggcccgtgacacggccgtcgctcagctcaagcaactgcgtgacaacgtcgccgctgagttcggcgaaaacaaggccgaactgttcgacgcccatcggcttatgctccaggacccggactatgcggaatgcgtcgaaggtttgattgcgcaagacaaggtgaacgccgaattcgcggtgaagagcgtcgccgaacagttcgccgccatgttcgctgcgatggatagctcgaccatgcaggctcgagccgctgatgtcaaggatgtttctcgccgcgtgatgaacgtgctgcaaggcaaatgcgatagcgcggcgcaggatggcagtgtacaaggcgatgctgtgcagaacggtattgtgcagaacgggatcgcgcagaacggcgaaagccacatcatcttcgccgaagatcttgctcccagcgagaccgcgcagctcgaccgcgctaaggttttgggcctcgtgaccgccaagggctcagcgaactcgcacaccgcgattctggcgcgcacgatgggcctgcccgccatcaccggtatcggcgacgcctttgacccggccgatgatggtcacgttgccgtaatcgacggcgccagcggtgcggtattcgtcgacccggacgaggccacgttgaccgaataccggcgcaggaaggccgaggctgaggagcacctaagcctcctgcggaagctcaagggcaagcccaccgaaaccaagtccggtcagcgggtccacctgtacgccaacatcagccgtccctctgacgcagccgccgtgctggccaacgatgctgagggcatcggcttgttccgcagtgagttcctgtatctggaacgcgaggactggccgaccgaggaatttcagttcgatgcatacggacaagtcgcacaggagatgggcgaccgtccggtcatcatccgtacgctcgacatcggcgcggacaaacaggtcgactactttaatctgggccacgaggataatcccgcgcttggttaccgggcaatccgcatctgcctgacccgcccggagattttcaaagtccagttacgcgcattattgcgcgcctcagcatacggcaacatcgccattatgctgcccatgatcacctctgtgcaggaggtacgcgacgccaagcggattcttgaagaagccaaaagcgagctgcgcggcgagcgcatcgacttcaacgagagtatccagatcggcgttatgattgagacgcctgcgtcggtcattatggccgacgagctggccgccgaagtcgatttcttctccatcggcaccaacgacctgacccaatacacgctggcctgtgaccgtcagaacccgagtctcgaacgctttgccgacccgcattcaccagctgtgctgcgcatgatccagatgactatcgaggctgcccatcgtcatggcatctggtgcggcatctgcggcgagcttggcgcagacttgagcctgaccgatacgttcctgcgcctaggaatcgacgaactgtccgtctcgcccaccagcgtcctgcccctgcgcaacgtcattcgcaaccactgagattcaaggtcgcttcggctgattccgatggctttttgggcattgcattcggctggacattcgacatcgcatcttgccggcatttcgtcgtggggcaaagtgtacaatcaccacgtttgctttcgcgcccagcgtaaatcgcgtcgccggctccgcgaacggatttccagtcacacagaatgccgtgaacagtcagccatgcctgttgcgcggcgaagagaaaagaagaagcagtggattatcctctctttaccaagctggccgccgagttcttcggcaccgccattctgatgatcttcggcaacggctccgtggccaacgttgagctcaagaacaccaagggccaccacgccggctggctgaacatcgccatgggctacggcttcggcgtcatgttcccggtgctcatgttcggtagcgtctccggcgcgcacatcaacccggccatgaccatcgcccaggccgtcaacggcctgttcccgtggagcgacgtgctgccgtacatcgtcgcccagctgctcggcgccctgctcggccagctcatcgtctacatcacttactacccgcactacaaggagaccgaggacgccgaggcgattctgggcaccttctgcaccactgacgcggacaaccagaaggtcaactacttcctcaacgagatgttcggcaccctggtgctcgtcttcggcgccctgtgctgcctgtccctggcttggggcaagcaggattacgccgccgcctccatcgtcgtcggcttcattgtgtggggcctcgtgacctccatgggtggcccgaccggccctggcctgaacccggcccgcgacctcatgccgcgtctgctgcacgccatcctgccgatcccgcacaagggctcctcccgctggggcgaggcctggattccggttgtggccccgattgtcggcgccattatcggcgcttggctgttcgtgttcttcttcgccagctgattcgttgattgattcatatatgcaaatggcctccgctcgttttgggcggaggccattgtcgttgaatcaggtaaacgcagagactactgctccaggaacacctgcggggccttcatgaagttcgtggcacagtgttcgccgcagaagtaataggacttgccctcatactcgcgcgtgatcgcgtcggcattcacagccacggtcatgccgcacaccgggtcggtggcggtttcgccgtccgcgggggcggtgtggtgcatgtgcattcccgtatccatagtgttctccttgttggttggattattggattggtcagatacgtgattggtttgattcagcgtggtgcgatcgtcgatgatgacggtcggctcgtgaggcgcgttggatgtggcggagccggtgatgttggcggcgttggcggattcggccgatccggctgattcgacatccgccgtgctgctgcccgagccagcggtgctatcggcagcacccacgttgatgttcgctccatgcagccggttcgcgttcagcaccaggcacactgagctcaacgccatcgccagacccgcgatcatcgggctcaacagccagccggtgaacgggtagagtacgccggcggccaccggaatgccgatgacgttgtagccgaacgcccaccccagattctcgcggatgttgcgcatcgtggcattggacaggttgatggtcttgatgacgccgcgcaagtcgccgctcatcaaggtcacgtccgccgactgcatcgccacgtccgtgccggtgccgatggcgatgccgagatccgcctgggccagcgcgggggcgtcgttgatgccgtcgcccaccatcgcaatcagagtgcgggattgtgcggccgtgcgggaggtgccgtacgcggacttggcggcggcctcgtcgcgttcgcgctgcagtttggcgatccagtaggccttgccgtccggcttgacctcgcagatcaccgtatcgatgccgacttcgcgggcgatgcgcccggctacctcggccttgtcgcccgacagcatcaccgtgcggatgccgcgtgcgcgcaacgccgcgatggcctcacgcgagccttccttgactgtgtcctgctcgtagctcggcttgtcccagtcggcggccgcgtccaccacgccgcgcgtgatggtgccggtcttgtcgaacaccacggtgccgatgcgacgcgcctgttccagcgccttggcactggtgaccagcacgccgttggtggcgcccaagcccagcgagaccgtcaccgacagcggcgtggccagtcccagcgcgcacgggcaggcgatgatcagcacactgaccgcggtgaccagcgcgtgcgccagttgcggcgccgggcccagtgacgcccagatggcgaacgtccagatggcgatgatcatcaccgccggcacgaaataccgggcgatcttatcggccagttgctgcaccggcgccttggtcgcctgggcgcgggccaccatcgccgcgatctgcgagagtaccgtgtccgcgccgacttgggtggcgcgcatcacgcagtcgcccttgagcagcacggtggccccggtcaccgggtcgcctgcggttttggagaccggcttggattcgccggtgatcatcgattcgtcgatacgcgcctcgccggccacgatcacgccgtccgtgggcacgcgctcgccgttcttgacgatcagcaggtcgccggtgacgatggcgtcgatgtcggtgtccgtgaaatgcgccggattacgccattcgatgccgtccacattgtctgcggaagtggcgttgagcttgtgcgcggtgcgcgggcgcagtctgataagcgactgcaccgccttgccggtgccttcgcgggccttggcctccagcaggcggccgaccagcaccagggtgatgaccacgccgaccgattcgaaatacggctcgcgcgagccctccgggaacacccacggggcgatgcaggtcaccagcgaatacaggtaggcggccgaagtgcccagcgagaccagcgagttcatgtcgggggagcggtgcgccagcgcggggaagccgaccgtgtggatcggacgcccgcagtagaacatcaccggcgtgatgagaatggcctgcagccacgggttcaccatccaatgcggcaccagcgcgggattggccatatgcagcatggtgacggcgaataccggcaacgtcagtaccgcgcccacaatcaccagcttcgtcagcgccttgatctcattggcgcgttcagccgcctctcgccgctcggcctccgccgcatccacaaccggagctccaacccgcaagtctgagggagagaccccctcggcttcggccgagccgtcagcacgcgggcgaagcccgtccttatccgcaccgtccttactctcctctccctcaaccctcaacaacccatgcaccatattcatgccgcatgcaaacggatattcgcccgccggcaacgccggtagttccacgtcggtggtggcgttgcccggcagcatggcgtcaagccccagatccgcgaacaccacatgcgaagtgcattcgccggtctcctgtcgatcgaaagtcagcgtgatcggcgtacccgtgcgcatgctgatcacggcgggggagtacccgcccttgacggtgattgttgcggattggcgttcgccggaggcgtccatggccccggccgtggctttctgcgttccgaagaagaaccgcagtaccagccatgtcaatgcggccgccgctatcagcgccgtggcggccgagaagatgctgagctccataaccgttccttccccttgtttgttgtactgaacaacagtgtataccctatacccctagagggtatataatggggtgtgttcagctgacggataagtatcagggggtttgcgatgcatggttatgacgaagacaaggccaaggtcatcgcacgattgcgccgtatcgaaggacaggtgcgtgccatcacgcagatggtggaggatgacaaatactgcatcgatatcctgacgcagatttcggcgtcgaattcggcgctgaaatccgtggcgttattgctgctggacgatcatctcaaccattgcgtgcggcaggcgtcgattcagggcggcgaggtggccgatgaaaaacttgcggaggcttccgcggccattgcgcgtctcgtcaaatcgtgacgagttttaccgtcattcaccatcgatgacatactgggtaccatgtttgagcaaataggaaccgtgattatcgtcatcgtcgtgctagtggttggtgcagggcttggcctcttcgccggcttcgtgctaggccgtcataagggtcaggagatggctcgaggcgtcaaaagcgaggagctggaagaggccaagacctcgctggagaatgcgcgattcgagaacgctgagctcagtgctcgcaatgctgccgcacaggctcagattgaaggcgtgaaccagcaattggctttcgccaagtcacaacttgcccaggcgcagcaggctgagcagattcgcattcagcaggaacgtgagcgtgcagctgcggaggcagaacggaagcgtcaggcggatgctcaggccgccgaggccaagcgtgctgaacaggaagcacgtttgaaagaacagagcaaggtgctcgaggcgcttgcgccagtggccaagaatcttgataccttgcagaacaaggtcacgcagatcgaagagggccgcaagagggaaatgggcgcattgggagcccaactcaaggggctcaacgatcagcaggcccgtttggacaaggaaaccagttccctgtccgccgcgttgcgcaacaacaaggtgcgtggcgcgtggggcgaggcccagctcaagaacattgtcgagtccgccggattgctggaacatgtcgatttcgacacccaggtggtggtcacggatgccgatgggcgtacgttgcgcccggatatgatcgtgcatctgccgggaggcaagaccattccgattgatgccaaagtgccttatgccgattaccagcgtgcctgcgaaatcccggacaccgccagccccgaggatattgcccgccgcgatgatttgctgcggtcccatgccaaggcgttgcgcgagcatgtacgtgctctcggcgaaaaggcctattggaatgcctttgatgtagcacctgattttgtggtggccttcatccccaatgaggcactactgcaggccgcgctcgaagccgatcccacactgatggatgatgcgttctctcgcaaagtggcgctcacctcgccggtcacgctctgggccgtgctgaaatccgtggcctatgcctggcagcagcagtcgctcaccgatgacgccaagcagctgttcgatctgtcccgagaactgtacgaacggttctccacgctgggtgattatgccatcaaattgggcacccagattactaagacggtcagtgcctacaacaagttcgcgtccagtttggaacgccgtgtgttgcccaccgctcgcaagctgcaaaaaatcgaaccgaccaagatcatcgaggaagtaccgatcatcgaatcagataaaggcaatgtgagcgaactgtccgcccctgaagtggtgccggccgatgaaggtgatactcatctgactgcctcaggcgatagtctggagtcatgactgaatctggattccgccccactggtaccccggaccttgccgtcgcgaagagccataatgactttgccatgctggagccgcgtgaacagctagccaccttgctgaaggagcatgtggtgggccgcccgttctccgaacttgccgcggtgactttcgaccaccgtgccgccactgtcatgggccatgtactgattgacgctttggaagatgcgggctattcgattgatgacttcgatgctgttggtgccttgaccgcagcatctgtgcccatggtgtctgccatgatccaggccgccgcctctcgtggcgaggacctagatggattcgtgatggacttcgtctacccgtccatcaagggcccctccatcgaaggccgccgtgtggtgctgttggatgcttggctgtccgaaaagtcgtacgtgcagaccagctcgctggtcaccctgcgcaacggcaatgagctgagcctcgactttggcatagtggagcagctgggtgccaaggtcgtggccatcgcctcgctggtcggtggcggtgccaaagacatcaatgtggtcaacccctccaccggcgacgagcaaacgctccccttcatccaggtcttcgacgaatccgaactgcggtaaatccacctttgacttccctcacataaagtcagccgggctgagcagcgaagctgactaagaggaaccggtgaatagcgttatcgaggagaaagattgcacgcacccaaccagatttctttggctgccaaagcttcaggtgaaccggaattccgtgaaatcggccttgggccgtggtctgagacccatcccggtgagcctcgtcccgatgatccgacttcttcgaattatgacggccgtttcgactcggtgctgttgaacgacggagaccgccgcaacgtattggaccgttaccgctactggaccgttgctgccattaaggccgatcttgacgctcgagggcgtcacgacttcgaagttgcggtggaaaactggacccacgattttaacatcggttccatggtccgcaccgctaatgccttccaggccaagcgcgtacacattgtcggtccacataagtggaatcgcaagggcgcgttgatgaccgaactgtaccagcacgtcgaacaccacccctccatcgccgaactggtggaaagctggcatcatcgcatcgccggtgaaatcgcctatgaacgagccaaggccggtgccgccgccgtccatgcgcatgatgtggctgtggatggagacaacaagcaccttcatgagctgctggccgaaatcgatgcttgtgatgcacgcatcaaggagcttcaagccgcccgcgtcatcgccctcgacattattcccggcgcagtgccgatggaagcctatgccttccccaagcggtgcctgctgctcttcggtgcagaaggccccggattgagcgagaaggccctcgcattggccgacgatgtggtctacatctctcaattcggttccgtgcgctccattaatgcaggcgctgcggcggccgtggccatgcacgcatggattgcccaacacgccgtatcaggcgtgtagccatgcgtcgacaatcctgccgcatggatcggcggtctcatcgtcaccagaaaagcggatatcaaataatgacccgagtgcctgccctgctgaaatggtctcaaagggtaggaaaatgcggtttcccgacaactgcgtgtcacatacggctcatatagttatggccatgccaacattttcacgcgaagaaatcgtgcatttgggcgatctggcccgaatcgcgctcaccgatgaggaaatcacccgtctgcagggcgaactgaacgtcatcgcagactccatcaacaaggtccaggaagtcgcctccgacgatgtgccgccgaccgccaacccggttccgctggaagcctacctgcgcccggacgtcgccgaaaccccgctcacgcaggaagaggcgctcgccggtggcccgaagaccgaggccggcatgttcgtggcaccgcgaatcctgggaagcgaggagtaatcgatgagcaacgaaaccgcaactctcgtcaaactgtctgctgccgagcaggccgctgccatcaagaagggcgacgtcacctctcgcgagctcgtcgaagcccacctcaaggtgatcgaggccgccgagccgtccatcaaggccttcctgaaggtttccggcgatgtggctctcgagcaggccgacgccttcgacgccaagtccgccgaagacaaggccgccctgcctgagctggctggtgtgccgattgccatcaaggacatgatcgtcaccaagggcatcgaaaccaccgccgcctccaagatcctcgagggctgggtgccgccgtacgacgccaccgtcatcgaaaagctcaaggccgccggcatgccgattctcggcaagaccaacctcgacgaattcgcccaggggtcctccaccgagcactccgcctaccagaccacccacaacccgtgggataccgagcgcgtgcccggcggttccggtggtggctccgcctccgcagtcgccgcattcgaggcaccgatcgccctcggcaccgacactggtggctcgattcgccagcccggcgccctgaccggcaccgtgggcgtcaaacccacctacggcggcgtctcccgtttcggagccatcgccatggcctcctcgctcgaccagatcggcccggtctcccgcaccgtgctcgactccgcactgctgcaggagatcatcggtggccacgacaagcgtgactccacctccatccccgaaggcccgcgcccgatggtcgccgccgcccgcgaaggcgccaagcgcgatctgaagggtatgaaggtcggcctcatcaaggaactcggcggcgacggcttccagcccggcgtcgaggcccgcttcaacgaggccgtcgacaagctcaaggagatgggtgccgaggtcgttgaggtctcggttccgcacatcggctactcgctaggcgcttactacatcatcatgccgtccgaggtcagctccaacctggcccgttacgatggcatgcgctacggcctgcgcgtgatgccgccgaccggcgtgccgcagaccgccgccaacatgatggcctacacccgtgaagccggcttcggcgacgaggtcaagcgccgtatcatcctcggcacctacgccctgtccgccggctactacgacgcctggtacggctcggcccagaaggtccgcacgctgattatcgaagacttcaagaaggccttcgaacaggtcgacgtgctcgtggcccccaccagcccgtccaccgccttcaagttcggcgagaagatggacgacccgctggccatgtacatgaacgacatcgccaccattccggccaacctcgccggcgtgcctgccatgtccatcccggccggcctgtccgacgacggcctgcccgtcggcttccagttcatcgccccgcagcagcgcgacgaagtcatgtacaagccggccgcggccctcgaagccgcgctggaagacagctggaacggcccgatctggaacgacctcaagaccccgtggcttgacggtctgggcaagtgagcatcggaaggaaagaaacaacatcatggctgaaaaactgatgaagtacgccgatgccaccaagaagtacgatgtggtcttcggtctggaaacccacgtggagctgtccacgaacaccaagctgttctgcccggcccacatcgagttcggtggcgagccgaacaccgagctgaccccggtgagccttggcctgccgggctctctgccggtgatcaacaagaccgccgtcgattacgccatcaagctgggtctggccctgcactgcgaaatcgccgagtggagccagttcgcccgtaagaactacttctacccggacatgccgcgcgactaccagatctcgcagtacgacaagcccaccaacggcaacggctacctggacgtcgagctggaagacggcaccgtgttccgcgtgccgatcgagcgcgcgcacatcgaggacgacgccggcaagaacacccacgtgggtggcgccgacggccgtatcgaaggcgccgaccactcgctggtcgactacaaccgtgccggtgtgccgctgattgagatcgtcaccaagccgatcgagggtgcgggcgaccgcgctcccgaaatcgccggtgcctatgtgcgcgccatccgcgacatcgtgcgcgcgttgaacatctcccacgctcgtatggagcagggcaacatgcgcgctgacgtgaacgtctcgttgcgcccgagcccggacgctccgtacggcacccgttccgagaccaagaatgtgaactcgttccgcggcatcgagaagaccatccagtacgagattcgccgtcaggccgctcgtctggacgacggcaaggagattctgcaggagacccgccactgggatgaggctacgcagaccaccgctggcggccgtctgaagtccgatgccgacgactaccgctacttcccggaccccgacctcgtcatgctccacatcaccaaggagcacatcgaggagatgaaggcccagatgccggaaatgccgcgcgagcgccgcaaccgcctcaagtccgagtggggcctgagtgatctgcagatgcgcgacatcctcaacgccgacgccctcgacctgattgaggaaaccgtcaaggccggtgccaaggctgccggtgcccgcaagtggtggctgggcgagctttcccgcgaagccaacgccaagggtgtgtccctcgaagagctgccgatcaccccggccgatgtggccgaggtcgagaagctcatcgcctccggcaagctcaacgacaagctcgccaagcagaccgtcgaaggcgtgcttaagggcgaaggcactccggacgaagtcgtcaagaagcacgactacaagatcgtcgaagacaacggtgccatcgaggcggccgtcgacgcggcgttcgaagccaacccggacgttgtcgagaagctcaagagcggcaacatgaagccgatgggtgtaatcatcggtgccgtgatgaaggccacgcgcggtcaggccgacgccaaggccgtcaccaaggtcgtcatgggcaagatcaagggctgattagattcactggctcccgctggcaggagctgtcgaacggagtgagactgagggtggtcgccatgtacggatgaccaccctcagtccgcttcgcggacagctcccgccagcgggagcctttattgattctgtaagaaagtcgactcagagcatttccagcgttcacccagtcgagtaagatatgttcggcactggaccgtgagccgaaacaagccgaaccgggggacgtataccgatgaccgcaaccaacgagacgctgagcatggctaccgaagcgcaactgaagcgcgatctgccacagagcatcgtcattccgccaatccgtggcgaaatggtgcacctgcgccccgccaccgtcgaggacctgcctcgtttggatgaacttgatgccttctatggcgcatccaagatcacaggtaaggatgcggtcaccgaacgcgccatcgtacacacgtgggtccgccgctcccaggcttgggaagccggtcaggcacccgccgaatccggtgtgggtgatccggaatcccgccgcaccatcgcatgggccgtattgactgacgccgaccatgacgatgacggtcagctcgatgcggccagcaccgataatgtcatcggcatgattttccttatcgacatcgacggctggtccaagtccgcccgcatccagatcatcttgggccgtgaataccgtggccgcggctactcccgtgacgccatgccgcgtgtgatgacctacggtttcgcgcccgaaccggccggcttgggcatgcaccgcatctgggtgagcgtgccggaaaagaacagccgctcgatttcggtctaccagtcgctcggcttcgtgccgtccggcacctcgcgcgacgcgttgtgggatgccgaaaacaacaaataccaggaccttatcgtcatggacacgttggctgacgagtacgatccgattcgttcgcttgacgcttttggcatgcacttgattgaggacaacccgggtgtcaaggaagcgctgtccgcgcgcgagcattccatcgccatccagcagaacaagccggaacccgagccggcacagcgtggtgaggcagccggcgccacgacgagtgacgtgcagtcccaggcccagacgccggcggccgcacagccagtcgaaccacaggccgagcaccacgacgatacgcagaagaacgcgcgccacagtctcgaagaggaaagcaactggccgtacggtcaggcagaacgcaagccctcaaaggaagcatggtggcgtacgctgggccgcggccgcaaacgcgatacggaaagtgagtgagtaaacaagcatgagtgccgaggatctcgacaattacgaaaccgacgccgaactcgcgctgtatagggaataccgtgacgtcatcaagctgttcacctatgtggtggagactgagcgtcgcttctacttggcgaataaggtcgatttcaacgtgcgttccgctggtcaggacgtgtatttcgatgtgcagctgactgacgcatgggtatgggatgtctaccgttccagccgtttcgtcaagtccgtgcgcatcgtgaccttcaaggacgtgaacgtcgaagaagtccagaaaaccgatatcgacattcccgacgatattcactgacaggcaatcgtctgatacagcctgtattgacaatgcgcggcattccgtcatcttacggcggggcgtcgcgcattgttcatacaacgcatagcaaaagttcaaactcgtaaccttgccatcgtgtgtcttgtttgcttgcggttgatagaagatgatgctgtttgcacttgcaggaatctcgctgaatctatggaaggttcgtcgctgacgaattagcccaagaccaaaccgattcgccgcgctgtgtgtgacgcaacgttgccgaatacccctacctcacgattcgatgcgtcgcctttctgctgatggaaagacggcgcatcggtcgtatatcgggagaattctgtaagcattcgctcatctttcggtgtgcgattccggggcttctagtagactgtctctgattttgcgtttataaggagcataatgaccgacaagcaatccgtagtgattatcggcggcggtccggctggacttaccgccgcatgggaactcatcaaggacggcggtgccgacaagtacgacgtgaccgtgctggaggggacccgcgaattcggcggtatctcgcgcaccgtgaagcacaacggcaaccgcatggatatcggcggccaccgtttcttctccaaagacgaacgcatcatggattggtggaagaccgttctgccgttgcagggcgcaccctcctatgatgacaagaagctcggccgcgaccacgacatggagccgggcggccccgatccggagacggaggacaaggtgatgctcaagcgccaccgagtgtcccgtatcttctggaaccgccacttcttcgattacccgatttcgctgagccccaacacgttgaaggccatgggcttcaagctcaccatggtggccggcttcagctacctgaagtccatgttccacaagctgccggaagacaatctggagaacttctacatcaaccgtttcggccgcaagctgtattcgatgttcttcgagggctacacggagaagctgtggggccgccacccctcccagatctccgccgactggggcgcccagcgcgtcaagggcctgtccatcatgggcgtgctcaagaacgccttccagaagcttagccccaggaagcgctccaacgcggaggtcgagacctcgctgatcgaggagttctggtatccgaagtacggtcccggccagctgtgggagaccgtcgagtccaattgcgaggccgccggcgtcaaggtgctgaccgacgccagggtggtcgaggtccgccagaccgatggtgccgtgtcttccgtggtgtacgaggattccgagggcaaccgcaccgagctttccggcgaccagttcatctcctcgatgccggtcaaggacctggtcaacgccatcgacgcggccggcgccgattccgaggccgttgattccaagcccgccccggccgatatgaccgaggtggccaacggcctgccgtaccgcgacttcgtgaccgtgggcctgctggtcaagcacctgaagctcaagaacaccaccaacatccccaccctcggcaatccgccgatcgtgccggactgctggatctacgtgcaggacccgggctacaaggtcggccgtctgcagatcttcaacaactggagcccgtacctggtcaagaacgtggacgacaccgtgtgggtcggcctcgagtacttctgcgaggagggcgactcgttctggaacatgagcgaggaggacgtcaccaagttcgcgatttccgagctcacccgcatgcgtgtgatcaacggtccggacgaggtcatcgactcccatcgtgagcgcgtcaggaaggcgtaccccgcctacttcgacacctatgagcacatggacgagctcatcgagtacctcgacggcttcggcaacctgtactgcgtgggccgtaacggccagcaccgctacaacaacatggaccactccatggccaccgccatggaggccgtcggcaacatcaagaccggcaagacgtccaagaagaacgtgtggtccgtcaacaccgaaaagtcctaccacgaagaaaagtgaataaaccttgttgagctccctcgtcacagagggagcttttttggttttcggcgggccgttttgcgttggtcgagttggcgttgtacagtgaacgaagttcgcagagactcagagacgcagcgaacattcatgagcggtgcaaccgcaataatcactcttaacgcctggataggcatgggtctgttcggtatggaaagggcaaccagtggcaaatagccagaatcttgaggatatgaagctgcctgagctcaaagagctcgctaaacagatgggcctgcgcggcacgtcgaccatgcgcaagcccgagctgctcgccaccctgcaggcggcgcgcaatggtggagagccgccggccggtgtgaccgtgcgcgcccccaaggccgccaaaaccgccaaggtcgtcaaggctccgcagtccgatgccgctgaggccaacaccacagacaatgctgacgtggccacccagtcgccggctccggctccggctgccacggaaccgcagctcgatttgccgcttcccgtggccgacgatgccaagaaggacgagaccgaaccgcgacgcacccgtcgtaaggccgccgatgatgccgcatccgaaccgcgtgcggcccgccatcgtcgcgatgacgaccagtccgatttcgctcgccgcaagccgcgcaagaaggccgatgaggccggcgatctgctggccacgctcgatttgggagatgcagcgcctaccgagcgtcgccgcgagcgccatgaggacgtggaagttccgctgattcgccgagtccgtgatgatgaggacgagcagcctcgccgccgtcgtcgcactgcggaaaacagcgaagaaaccgtgcgtgacctcgacgatatcctggccacgctgcccacgcagaagcacgaggaaacgtccgaagacggcgagcagaacgacgatcacgagttcgtgcgtcgtaaccgccgcgaccgtagcgatcgcaacgatcgcgatacccgtaatgatcgcagcgatcgccgtaaccgtcgcatgcgtggccgtgatcgcgacaacgccgatgatgatcgtcgctatgatgatcgcgataatcgtagcgatcgcaatgaccgtgatagccgccgcgaagagccgcaggaggatctggtgccggtggccggcatcgtcgacgtgctcgactcctacgcttttgtgcgcacttccggctacctgcccggcccgaacgacgtgtacgtttccatgggccaggtcaagaagtacggcctgcgcaagggcgatgccgtgcatggttcgattcgcgccccgcgtgaaggcgaccgccgcaaccagcgccagaagttcgtgccgctgcaggccatcgattccatcaacggccaaagcgttgaagaagcgctcaaccgtccgcagttctccaagctcacgccgctgtacccgcaggagcgtttgaagcaggagaccgccccgaacaagctcaccggccgtatcatggacatcgtttccccaatcggcaagggccagcgtggcctgattgtctccccgccgaaggccggtaagaccatcaccctgcagaacatcgccaactccatcgccgccaacaaccccgaggtccaccttatggtggtgctcgtggacgagcgacccgaagaggtcaccgatatggagcgcacggtccagggcgaggtcatttcctccaccttcgaccgtccggcctccgatcacactacggttgccgaactggccgtcgaacgcgccaagcgtcttgtggagctcggccaggacgtggtcgtactgctcgattccatgacccgactggctcgcgcttacaacatcgcagcccctgcctccggccgcatcctgtccggtggtgtggacgcgcaggccctctacccgccgaagaagttcttcggtgcggcccgcaacatcgaaaacggcggctccctgaccatcatctcatctgcgctggtggaaaccggctccaagatggacgaggtgattttcgaggagttcaagggcaccggcaacatggaactgcgcctgtcccgcgagctggcggacaagcgactgttcccggccatcgacatcaacgcttccggcacccgccgcgaggagctcatcaccaacccgcaggaactgccgattatctaccgtctgcgtcgactgctgggcggcatggagcccgagcaggcctaccagacgctggtgccgcgcctcaagaagaccgccaccaaccgcgacttcctcgccgccatcgtgcagcaggccaacaccggcaacgcggtcaacggcaactgatcagaccgctgaacaatagtgtaagggctgcaccctgattgatacggggtgcagcccttgtcgtatctgatgcaaatacatcaactatcacattgcagttgtagtattgccgtcaacgttcacatgcacgctgacgatatatgagatgaaagaggcatcactgggttcgattgttttgggagtgggcagtggtgcggccatgttcggcgatgcggatgccagccatatcctcaccggcgactatgacatctgagatatctgactttgcgcatcgtgcaaagccgtaatcgggagtatcctcgaatctatgagcgaaacgagcagcgactggcaaaggaccaccatcgactccgcccaggcggcggcccacccggaaaccgcacaagcggtggcgcgcatcaaagcgctgcgccaaaccatcgataacatcgattcggcggtcatcgcattactggccgagcggttcaaggccacctcgcaggtcggcgtgctcaaagccaacgccggattcgcgcccgaagacaccaagcgtgaggactatcagatcgaacgcctccaccgcatcgccatcgatgccgggcttgatccggaaattgccgaaatgtaccgtgaattcgtggttaccgaagccaagaagcgccaccagcgcatagccgatgccggtggtgacccgggcgtactcgacgtattcgcctgattcgcccgcagcgaatgggcacctttcggatattcgtctatagggcaagttgcctgcagcgactacattaatacgggaatggaatgcccgtagtggtcgactgtatgaatgggatacgtagatgagatgtggtgccgcactggtcagttgcgcattgtgcgtggcttcgattctcggcggtgcttggatgtctcgtccgactccggttgattacggtccggtgctcgctacggcaagtgatatgtacgccgtcaccgatgccgaaggggagccggtccgttggtatgtggtagggaagggcggcgccggcaatggcgccagtgccgattccggcaatagcggttccactgataccgattccgccaatagtaattccggcacgtccaaggtttctcgtatccccgcttccgccgccaccctgccatggaaagtcagcgtcacctactcgcttgacggtccgaacgtcgaggcaaacgaggttgccggcgcgtctggactgatcggcgtgtatatcgatattaagccgcaaaccaaggaagccaaccgtacgatcccggttgtcgcctttaccgtgcctacgcaggtagccgatgatgtttccgctgacaactccattacggtgaccacgcaaggttccaataccgtagtcgccgcagctggaaaagccgcaaccggcttggaattcagctgctatatgaacgccaaagacttctccatgagttccgtggcgctcgccgtattgccttccaattccagcagtccggcagttggtgctaatcccgatgccgcgaatgctgcgaatgctgccgcacagcctgctgccgatacggatgtcgcccaactcaccgcctctgccgccacactggtcgattcactgaccgacgccggttctggtgaacagcaacagctcatcgagcagcttcaaaccctgcgcgataacgaacgtgcgctgaacaagtctgtagtggccgaacgcgaaaccgcccataagcggacgtttgaagactatatggccgcgtatgtgggctcatataccacgcacctgtctggatcgattggcacctccacccagttgccggcgttgatgggcacgaccggcgaactgtccggggacacgcctttggctcaagccgtactcgacttggccaacgcggtgaacaacgtcagtgccgcacatcagcatgccggtgcggtcgatgcgttggacgaggtgattcgccgcatccagcagcaaggcaccaccggactggtggatgatctgatcgccgaggcttcggaggaagccactcaaggctccaagcaatacgccgatggccagagccagctctccgccgcaatgattccgtattcgatgaaatacacggacgtttacacggccaatttgagcgccctgaccggcggcacgtcctcgggcgccaccgcttacgagagccaagccatcgccgaaaccaacggtagcgatgaactcgccgacgctcaatccaaggtcgatgccgcgatgagcacgcttgccaccgcctccgagcatacgggcaaagccacggccttgcgccagattgtattgcgattctccgatcagttcgaaggcggcgcgtcctcggcttccggcagtgatggtgatggttcgtccggtgatgtctcttccgatccggtgaccgaggctcaggcactgaccggcctggtcgattcgcaatcgcaatcgttctacggcaagacccgggtcgcccaagccaagcgtaaggccgatgccgcccgtaagcaggccaaagccgcgcaacagcagcagtcgcagcattccaaggcctcactggtcgatgacaccatgtccatgtctgctggcgatgtgatgaactatgcgggtggtcttacttcggccatcggtggtggaggtaagttcgattcgtccaagagcgatggttcgggaacgaacgactcagccaagtcgagcgatactggcgattccggcaacaatcttgacaccgctccagtactgttcggctttggcactggcggcacgctgctcaagcatgacatgagcgcgctgatcaatgagaccgtggagatcagcgatgctggcacgctcttggcgcaggccgtcgcgcagctcgatagccccaatacgcaacaaaaaaccgccgaaacccgatacctcatcgtgattccgacggtgtgatggtgtatgcgggaaaatccgcatgcgacaggtgcccaatacgcgtaaagtgcgttatcggtgtgggacgccgcatcaaaaactggctttttcgatgcggcgtcccacaccctcttgtaagtcagagctaactatagtttgaagaatggctaaattccaaggatttgttgattcggtctgtgggacgccgcgtatataaaacgtttgacacgcgtggtggcccacgctattgtgggccgccagcttacaatgcgggatatttgcgtgccgtcccacagtcgtgtcatccgaacgtcaaaaaacaaaagaggggaacctcaataggttcccctcttttgttgttgtgcgtaacgttcagtgctttggcttcttagctggccgagccgttaagcgggaagcccggtgggcttcccgtaggctcggaacgagcggcattgccgtgagacctactgttgttgtgcgtaacgttcagtgctttggcttcttagctggccgagccgttaagcgggaagcccggtgggcttcccgtaggctcggaacgagcggcattgccgtgagacctactgttgttgtgcgtaacgttcagtgctttggcttcttagctggcggctcaccgagctcgctggcttcgacggcgacctcggtttcgggcgtgccttcggcggcggattcctcggcgtgcttggccaccaagtcgaacttgccgaccacgcgaccggcctgtgcgatatcgcccaaggcggcgtgaatcgcttccacaccttccgaagcagcggacagtgccacagacaggattggggtcttcatggagaccttggcctcggacttgatcttacgcagctgctccacggccttgccggcccaagtcagcagttcgggggaagcaccggtggcggcctcgacatacgggtccacgaccggccaggcggcgcgatgcacggaaccggaaccggcgtgcatccagctccacacttcctcggtggcgtacggcaggtacggggccagcagacgtgcgaaggcgtccaggcccagacccagagcggtgcgggcggacttcacagccttctcggacggcacattgccgtgctcgtccggagtgccataggcgcggttcttgaccagctcgatgtagtcgtcgcagaactgccagaagtaggactcgatgacttccagcgccttggaatgctcgtaggattccagcgcctcggtggcctgacgcaccaccaaagccagcttggccatagcggcgcgatccagcggttcggtcacatcggccgggttccacgcggcctcggcggcagcgcccacgtgatggttctcgtcctcacggccgatggccagcgcgaacttggtggcgttcagcagcttgatggccagtcgacggccaatcttcatctggccgatgtcgtacgtggcatcgaggcccaggcgagcggcggcggcccagtaacgcacggcgtccgcgccgaacttctcgatcggctcgttcggcaccacgacgttgcccttggacttcgacatcttcttgtggtcggggtccagaatccagccggacagcgtggcatgggcccacggcagacacttgttctccaagtgcgcgcggtccacagtcgagaacagccaggtgcggatgatgtcctgaccctgcgggcgaaggtccatcgggaaggtggaagcgaacagggccttggaggcctcgtccggctcggcccagtgggtcacgatctgtggggtcagcgaagaggtggcccaggtgtccatgatgtccttttcggcggtgaaaccaccgggcacatcacgctgggactcgtcgtagccctccggcacgtcgatggtcgggtcgatcggcagacgatcctcggacggagtgattgggtgatcgtaatccggctcgccggaagcgttcaccgggtaccacagcgggaacgggacgccgaagaagcgctgacgggagatcagccagtcgccgttcaggccgtgcacccagttctcataacgcacgcgcatgaagtcggggtggaactcgagttccttgccacgctcgataagctcggcgttcagcttggcgtcggtaccgccgttcttcaaataccactggcgggaggtgacgatctcgagcggcttgtcgcccttctcgtagaagttcgtcatacgcttggtcggggtcggctcgccgtccagatcgccggactcgcgcagcttgtcgacgatgatcttgcgggcggagaacgtggtcttgccagcggtttcggcaaagacctcgcggccggccgggtcctcgatccagtccggggtatccatcacgatacggccgttgcgctggatgatcgggcgggtgggcagcttcaggtcgcgccaccactcgacgtcggtcacatcaccgaacgtacagcacatggcgataccggcacccttgtccatttcggcggccgggtgcgccagaatcggcaccttgaccttgaacagaggggagtagacgtactggccgaagtactgcttgtagcgttcgtcgttcgggttggcgatcagcgaggtgcaggccgccagcagttcggggcgggtggtctcgatgtagatcggggtgccgtcctcaaagcggaaggccaccttgtggtagaagccggggtattcgcgcgattcgagctcggcctgggccacggcggtctggaaggtcacatcccacaggccgggggcgtcctgctggtaggcctcgccacgggcgaggttgcgcaggaaggccttctgggccacacgctgcgggtgttgaccaatggtgtggtaggtctgcgaccagtcaatggacagacccagcttgcgccacagggcctcaaacagcttctcatcctgagcagtcagacgctcgcacagctcgatgaagttcttgcgggaaatcggcacctgatccttggcgtcaatcttcttgccatcagtgccttcaaacggcggcttgaagtccgggtcgtaaggcagagacacgtccacgcgcacgccatagtagttctgcacgcggcgctcggtaggcaggccgttgtcatcccaacccatcgggtagaacacgtcgtagccgcgcatgcgcttgtagcgcgcaatcacatcggtgtgcgtgtaagagaacacgtgacccacgtgcagcgaaccggagacggtgggcggcggggtgtcgatggagtagacggccttgcggtcgcgggtgttgcggaatttgtaggtgccgtcttcatcccagacggtgcgccacttgtcctcaagtccgtccacgccgaccttgtcgggcagcggggtgaggttggcgttgatgatggatttgccttcagtcataaggccaaagtttatgcacgttgcatgacaagccgaactgtacagtaaacagcccagtaggctgttcgcaggcgaggtacgaacgatcgaacgatagtgagccaaggactatcggtcgtagcccgtccgtgactgaaggttgcctacttcaccgtcaacccggccagcggcatgcggcgattgatcatcgaggtcgggtagccggagaccttggtggacgccacagtgaagcatttgcgggtatacagccaatcactggccgcatcctcgctgatcagccgggcgtacgccttcattcgtgcctcataatcggcgtcattagtggcggcgcgagcatccgcataggcctgttgcgcttcggtatggtcgtaatggaacatggaatcggggtcggcgaatatgccggcatcatccgtgccgtccatgctcatcacggtcagttcccatttgccgtccttgattcgtttggcataatcctcatcggagagcacttcaaggttcaccgtggggcgcggctgccgctcgatctgctgcttgatggtttcggccaacgaccggtattcttcgggaaccaccagattcaccgtagtcaggtattgcgcaccaaagtaggagaacatctgcccagcttggttttcgtcatgcgggtacagtccggtcaaatcttcgtatccgggttccagcaggctgatggggccgcccaatgctccggctgcgtcgggtcgggcggaggcgatgccggctgcgtcgatttgatagcggaaggctttacgcgcctgttcgtcggagagcagcgaatcggtgccgttgttgtaggccagcagcaccttatccgtagtggccccctccttgacggtcaggccatccttgccgttcaaaccggtggccgtcgaagccgaaaccggtgccgccatatcgagactgccgtcggtcagggccttgctgagcgcatcggcgtcggagtattgcataaattcaacgacattgctggccgctttggtgccatggtaggtatcgctgcgcgccagcttcagggaatggccaggctggaaatcggccacggtgaatggtccggaacctatggccttgcgttgataatcggcactggacgactcggaatcgtagacaatgccgagtctgccggacagcgctcgcagcagcgtcggattgggcttggcaagcgtaatgaccaccgtggtggcgttcggattggcgaccgacgccagattgcccaattcgtcgacgtccgccaccttgttggtcacgttctgttgcaacgaccacacggcgtccgaggcgtccaacgtatggccgttcgagaaggtgacgcccgattgcagtgtcagggtgacggtcagtccgtcatcggaagtcttccagcttgtcgccagtcccggctgaagcttgttgtcttgatcgacggtcactaatgtctcatacacattgtcgacgagcaggcgttcggctgccgcagaggaatcggaccgaatatccaaggattgcggcatatcgtcgatgccaatggtcacatcggcatcgagggacgatcccggctggaaccggttttgcatgaacgtccatcccacaaccacgagtgcgccgagtgccacggcgactccgagaaaaatcccccacttggaccatgtattgtcccgcttgctgtgctgcatggttttcagtctagcggtggattcagcctagaatccgcaattcaccatgatgaggtatgagttagcgcttggacgtgctcttgccggcgggcggcgcatagctagggcaggtgtcggacagcgggcagttggcgcagtcaggggtacgtgcgtggcaggtggcccggccgaacagaatcagtcggtggctgagattcgtccactcttcgggcggaaaacaggaggtgatttccttctcgattttcacgggatcggggtgtgcggaccgccaatccgaccgccaacgcagtcgtccggttacgcgcatcacatgcgtatcgaccgggaatccggggatatcgaacgcgttgccgagcacgacgttcgcggttttgcgaccgacccccggcaagctggtcagttcatccatcgtgcgcggcaccacgccgccgaatcgttcgtccagtgccgtggccagtccgatgagatgctgggttttcgaacgatagaaccccagcggatgaatgatgtcttcgacttgggccgggttcgcggccgccaagtcacgggcggtggggtaggtggcgaacagttccggggtgaccgtgttgacacgcttgtcggtggtctgggcgctgagcacggtggcgatcagcaattcgagcggattcgagaaatgcagtgcgcaagcgggtgccggaatcacctggcgcagaatgtcgtattcgtcatgcatgcgcgtgagacgcgcggatttggtttctctcatcgtatggacctaagcggcgtaatgtcgatgattgatagtttgcagcgccgctggtctgtcaggcgacggtgttgagatcgggagtatcgtcatcggtgtcgatggcggcagaggatgctttggcggcctgctgtgcggcggcagtttccttatccgtctccggcgggtcgaatcggtagcccacgttgcgcacggtgccgatgaggtgttcgtattcgccgccgagcttggcgcgcagacgacggatatgcacgtcgaccgtacgagtgccaccgtagtagtcgtagccccatacttcctgcagcaactgggcgcgcgtgaacacgcggccggggtgctggaccaagtacttgaggagttcgaactccttgtatgccagatcgatggggcgtccatgcagggaggcggtatagccgttggtgtccacaatgaggtcgccggagcgaatctggccatcttccaccgtggtggtggattcggcgggagaaccggctgctgcggctgcgggagcgttgccgcgctcggagaccaatcgcaatcggccctcgacttcggccggggaagcggtggcgaccaccacatccgcaatgccccactgggagttgaccacggtgaagccgccttcggtcagcaccagcacgattggcgtggacaggccggaagcgtggatgaggcggcacaaggttttggcggtcgccagatcatcgcgtgcatccagaaacagaatggtgttctccggcatcttcaccaagctggctgcatccatcggcagtacgcggacgcgatgagaaagcagggcgagtgatggcaaaacggtggcggggtcgctggcgaaagtcatcaacgtaagatccgtcacgctaatcccccttatcctgcaatgtgttacgcaattgctcggtgtggctgtacgagtcgtcagcggcgttatgccgctttcgcacggttttcattattctacgcgcttgtagtggacacataggttacaagtttgcggaatatggaacggcggacgtccatcaaccgatgatacggccgagcaccagtgcggttgcggcgatggtcacgcccatcagcattaccggcatcaggccggtaccgatccacggatagcggatatccgggtccggatcggcgtcgcgcacccacaacgtggaagccacggccaaagccagtcccaaaacgatgaggatgatcagggcaacggttcccgcaacggtgcccttggcgagcatcgcgcccaaatcaggtaggaagcaccagccggccacggcgagagctgccacaccggaagtcacggcgtgagagagtgcgcggataagatgttcgcgcttctcacgagccatctggcgtccgaaggagaagaccaccagcaccaccagcagcaggcccatggccagtgcccatgaataccaaggaagtaccgagccatccgcagcggtctgatccggcggaacctcgctggtcgggaaaggtacgatgacgaaaatcagagaaatcgcgccaaacaccaaagtgacgatacgatccagtatgctgccgcggaacggccagaatacgacaaatgcggccaacgtcagagcggcgataatcaaagggatgatggggacggtgccaggggagggaatgaccgtggctgcgatgaacagtacataggacgtcagttgggccaacaacatgctcagagctttgttcttccaaccctcctgggtgatctcggtcatgatacgcctctcagataatcgaatttctatcccaatcctacgtcgggcattggaacggtgaaatcaaacaaaatagccccttctggtgaaggggcttatggcactaaatcagaacgcgataacgcccaaatgctccaatagcactttgatgccgagtagaatcagcaccacgccgccggcgatctgcgccggcttctgccagcgggaaccgaacgcgcggccaatgtgcaggcccgcagcggagaacagtccggtgaccacaccgatgctgaggatggcgaatgccatatgggctttggtgaacatgaaggccaggctcacgcccacggcgaacgcatcgatgctgcaggccacggccaggggaagcatatgcttccaatcgaactgggcggtctccttggagttttcctcatcttcttcgaaggcttcgtgaaccatgttgccgccgatgaacaccaacagggcgaagatgatccaatggtcgaattgggttacgtatttgctgaatgtagatgccgcgaaatagccgagaatagggaacagcatctggaatccgccgaaccagagggcgcttttcacggcgtcttgtactcgtacgcgggatacggtcaggcctttgccaatggatacggcgaatgcatccatagctacggaaacagaaataagcaggatttgaatgattatcgaaatcatggtgtgacagaaggttcatcgccggattaccgtgcgatgggcctcgaccagcgttcctacacgccgcctacgcctagttgaaaagacaaaacattactgtatcacaaaatacaagctccctctgttggggagctggcgcagtgaaactgcgactgagggagagtagagcggctttgccacaaatacaacaaaaggcccccgaaggggcctcctgtcaacgattcagaatcgaatcacttctcggaatcggcgagacgctgacgcgcggcaatgatttccttttcggcggcgtcagcaccagtccagtagtcgcccggcaggacttccttgcccggctccagagccttgtactgctcgaagaagtgcttgatttcggccttgtggtactcgttgacgtcgtcgatgtccttgatgtcatcgaaacgaacgtcggcgggcacgcacagcaccttgtcgtcgccgccggcctcgtcgaccatgtggtacaggcccacggcgcggcactcgaccacgcagcccgggaacacggagttcggaatcatcacgagagcgtccagcggatcgccgtcctcgcccagggtgccgtcgatgtagccgtagtcatccgggtaacccattgcggtgaacagggtacggtccaggaagacgcgaccggtctcgtgatcgacttcgtacttgttcttggagccgcgcggaatttccacaacgacgttgaaggtttctgccatgtcatttctccttgaaaatcgacagttacgttatcgtctcaccacaataccctgtttacgcctgcaaaacaggtgcggaactcaagaaaccgtgctgagattatgccgacactatgcccaaacagacgaaatcctccccttgaggggaggatttctagcggtttacgcgcacgataaccccatgcacgtcaacggcatcactgttgcattaccgttgcagtaccgcatcactgcacggacaggatgtgggccacatccgcccaaggagccagagacacgtagttgtcccaaccccactggaattcgcggccggtcagctcgtcgcgcacgttgagcgggcggtcggtgggcagacccagctcgctgagttccaggtgaatcatcgactggtgtgcgttgtgtccatcgaggttcacgaccacaatcagcgtgtccgcttggccggtaccggtcagttcggccggcgtgtggcgtgcgaaagccagaatattcgggtcggacgtaggtagcacggtgaggttgtggtagctcaacgcggccgggtgggcgcgacgaatcttgttgagcgcggtgagcatctcggccacgccgtactgcttggccttgctccaatcgcgaaccttgacctcgtacttctcgttgtcgatctgctcttcgaagccggggcgctgcttgttctcgatgagttcgtaaccgttgtagataccccaggacggcgagcccatggctgccagcaccgcacgcacgcagtggccggctacgccgttgtctcgcacgtaagcggtgagaatatccggcgtggtgggccagaaggtgttgtgctggtagtagccgtcgtcgccattggtgaccggcagatactcttccagttcgtccttggtgttgcgccacgggaagtagcagtgggactgggtgaagcccacgtagctcagggcgcgcatcatgcccgggcgggtgaatgcctcggccaggaacaggatctccgggtgcttcttggtcacggcggcaatcacgtcctgccagaaacgcaccggcttggtgtgcgggttatcgatgcggaagatggtgacgcccgcctcgatccacagattcatgatgcgttcgacttctttttcgatgccgggcatgtcggcgttgaagtcgatcgggtagatgtcctgatacttcttcggcgggttctcggcgaaggcgatggagccgtccggcttgtgacggaaccagttcgggtgggccttgacccacgggtgatcgggcgagcactgcagagcgaaatcaagcgcgatttccagacccagttcatgtgcacgctggcacagggccttgaaatcgtccatggtgccgagcagcggatccacggtgtcgtggccacctagctcggagccgatgccgaacggtgagcccgggtcatcggggccggcgaccagcgtgttgttgcggcccttgcggttggtcacgccaatcgggaagaccggcggcaggtagacgatgtcgaagccctcggcagcggcgcgttcgaggccggccatcgaagtcttcagcgtaccctgaatgatcttgccggtgttcggatcgatggtggcgccttcggaacgcgggaagaactggtaccaagccgcgaagctggacttcgggcgttccaccttgaagcgctggggctggctgggggagatgccgtcgcgcagcgggtgagtctcgtgcagggcggcgatggtcgggttgtcgccggcggcgagacgatcctcggcgctcagcgtctgatcggccatggtctcagcggccttctccaaggtcttgcgatcgcgtgcggtcaggccggcgtccggggttgcggcccaacgggccagcagctcggcaccggaattgagtgcgttgtccacgtcgtccatcacacgcaccttgatgcgggcgtcgtgcagccaggagacgtacgcgtcttcccaaccttcgatggtcacggtccattcgccgagctgacgcttgacggccgcgtagccatcctcccaaggcttcagatcgctgtgctcgccgcacttgaccatcacggtccaacgatcgaggccgggatttacgcaggtcatggcccggcgcatggtttccttgccgcgcgggttgcgcacgatggcggtggcacccaccttggtacggccttcgatgaacacctgggcggtcatctcaaacggttcgccgagttccacacgggcggggaagatgccgcgctcctcggcgggagtgatgtccatgacattgatgcggccgaactggccgggctcgtttgcttcgatggacggtgcgggggcttcgacagccaggcctttcagcgctgctgcggcgcgtgccgtttcggcgctgactctcttgcgcttggttgcggggctctttcgggcagaagtcgcctttgacttcgttttcgtggtgctgttatcggtattactagtgcgcgtggtcgcgcgatgttgtactgctgccataaggccctattctaagggcttttgaacatatgttgcgcattgtggataactatcaggtaaacgttcggtcaaccgcatgaggtggataactcggcggaagagttatccacaactcgccggcaaacggcaagctcggaccacataggtcgaaaaaccggctgtagcgaatgaaaatctgccatgatcgtggcctacccgcacacagtgcagtatgcggggaaacgtaccaggaaaggacgaatgatgataacgacatggcggcaacggggcatggccatcgtagcgatgctgaccggtctgataataatggtgggagtggtgttcggctcggcgaatacggcgtatgccgcgacgttgacgcccgccgacgaaagatatcacgtggcgtttccatacaacgatatggaatattacgtcggtgtcgcggggctggacgcttcgggcaacaagtactactgcatcgaagcggggaaactgagcgactatgtgataggccccaccacggtgcttgcctccgatgagaacgcccggcgtatggcatggatccttgaccggtaccgcgacacggatgccgccacccatgcggcgatcggcatcatcgtgcaggatcacttcgggcgcgatcgggacgagtgggcgagacagatggcggtcattcaaggccggtaccccgagatcgtggcgaaggcggcccggatatgggatcaatcggccggcaagacgcctgcgggcacgacggtggaacgcaccgatgccgaggctttgcgcagcggttccatctcggtgaaagtggtgaaccgcgccggtgacgcgatcgcgggagtgccgttcaccgtcaccttgcagggggcggcgcggttcgtccaaggcggcaacacgttctcgggggtgtcgacgagcgccgggtcctcgatcgcgtgggaggcgaccggcgccggcgaggtgacggcgaacaccacatacgagtatgggcggatgcacgtcatggacagcactcaggacatgctggcctttgactcgatggcttccactggcggcgcgtcgacgacatttcgggtgcgtaaggattttgttccggcggtatccaccaaggtctccgagaaggtgcttgatgtggcttctccggtgttcgatgacgtgaccagtggcgtggcggatgcggacagttattgggtgcccgatttggaattgcaggcccgcggatactatttcgatggtcttgatacgggcgatgtgggcaatgtcattacgccgaatgcacaagagagcgccgatgcttttcttgcgcgattggcgactttgggttatgagccggtggcctatggcaaggcctctttcaccggggtggggcagcaggcacgtgtgcaggccatgaccaagccggatgacggtgccgcttaccggaccaagcagaatagcggttttggcacatgggtatgggtgtttcggcggtccgagcagagcaaacaggcgcaggaataccttataggcgactggataagtccgtttatggaggctacggaaagcaatacaagtcgcaggaagctagaagtcatgtcgacggtcactgagcattcggcggatatcggtgccgagctcagcgacaccattaccgtatcgggattccctgcggatcatggccagtatgccggcaacgaagagtatgagttcgcggcggatcggccgtatgcgacggtgagcgtatggtggtccggcgatcccgacaacccctccaacgatgaggcgtacaagccatccgggggagaggttcccacggaagacgacaaccaccggttgctggccacctgggagattcccgcgatgaacggcacgttcaaaatcggcgccggggcgttggacgcgcatggcgctcctatgtatctgaccgccgaacggcctgggtggtacgtgttcgtctggcggttcgagggggatgaccgtgtttccccggcgtccagccggtatgacgatgcctgggagcgtgtgcgggtgttgcccccatgcgagtcggagaaaccgtgcgaaccggagaaacccgagacgccgccggcgccggcggaggcaaccacgtccaaccctcgcccgtcactgcccgtcacgggtggcgatgtgtcgcttgcttcggttctggccgtgtcagctctggcgataggcgccatactgtccatcgtcgttcggtggcgtcgtcgctatgaccgattcaagcactggacgatgcgctggccgatatgttgacccgctgcggcatgatgccgatgatgtcggctggatggtgaaccgcactccgcttctgagcagaagaacgggagctgggcacgaagtcgatcgtaacatacgacttgtgcccggcttccgcttcattgagaaacttcacgcctgtcgcctcccgcggattagacaactgaagatccgcgatgaaaacgacgagacgtttatgatcgccgacttccctgggcaccgtagctgcctgatcgcctttcatccatatcgccacggtaaacggaaaggccgctgatttcggtaccgaaatcagcggccatataaccacgttcgtagcggggcatggatttgaaccatggacctctggggctaaaccaccttggatatatcccgattactgggcgctggttgactagctgcgcatggtggtagcgtgcggccatggcgaagaaaatggttatgcccgttgcgtgggcgcaagatgttgattgctggttggagacgttgaaggccgctggtttcagcgacgacacggtgaggtcgcgccggtacaagatagcgcggttgtgccgtgagctgccaagcccgatggagacaaccggtgagcagataacgcgggttttcgcggcgcatgattggaaacccgagacgcgcaagggctatcgcaacacgatagccgggttctaccgctggttctatgagacgggtcggcgtggtgacaatcccacggcgaaggtgccgaaggtgaagaagccacaggcgcacccccacccttgccctgacaaatatattctcatggcgttggggaaggccaccgaagatgaacggcgcatgatacggctcgccgccgaatgcggcctacgtcgttccgagattgccgccgtgaacagtgatgatgtgatggacgatttgctaggcaagtcgcttatcgtgcgaggcaagggcgacaagcagcgcatagtaccgtgccctgacgatttggccgctgagatacaagcgtgcggcggctacctgttccccggcagatggtcgggacacgtcgaagcgtcttacgtgggcaagcacattacacggctgctgcctgatggctggtcggcccactcgctacggcaccggtacgccaccagaacctatgagtcaacacatgacctgtacttggtgagcaaactgctgggccattcctcggtcgagacaacacaaatctacgttgcgatgcctgacagccggttacgcgccggcatgtccgccgtcactctgcaagcctgataagattctgacaacccaaagaaggattaaccatgaaaaagattatcgcagcagccgtcaccgttaccaccgtgttgtcgttggccgcttgcggcggcaatacagccgtcgataagtccgattgtctggacgtgccgcaagacgtgctgaatgtcgtggcttcaggcagcgacagcagcggtttaaagcccgagaccggcaaggccgtgaagggcgacaccgaaggcacctattggcttgccatgaagttcaccgccgatggtttcaacggtgataccgagaccggtatatggctggtgtccggtcttgatgccgccagcgccgcgccggtcatgtcggttgacggtttcgccaagcaattcacgcactggcccacgcaaatcaacggtaccgagctgaacggcaccgaagagaaggcgaaggccgctgccgcgtgtctggcctgatatgcaacagccccccacattgtgtgggggctgttgcatcattgcgcgtgcttggcgcgtgatttcggggtgattgggttgtctttccaccatgcccagagcgcggctcccacgttgaagagcagcgcgactagctggttcacggtttcgtccgcaatcggtatggtgtccacgccgaacatgacaagcgccgcgttgacaagtcccaagagaagcacaatgaagcgggcgattgtggccgcgctgatgccgggcgtgcgcgggtcgccgccttccacctgttcctcgttatccatggtttagccttccttctcggtcttgctggtcgcggtcacgttgatttcgagcgcgtccagtttcgctttcacggcggtttcaacggttttggcgatatcggcggggttgctgccgagcgccttggagagcgcttcaatcgccgccgtctgagcggtgattgtcgcggtcatctcacgcacgcgcttgtcgatgtagcacacgcgcgtgtagatgtcgcctctgctgccgtccttggtgccgccgtcgtccgtgcgggtgaggattcggtagagcgcggcggtgtcgtgatgtacccaactgagcctcacccatgcgggtaggttgttcttgccgcttgtggcgttctcgccaagtccgtagttccaaacgtctccggcgctggtcatgtcgtttccttccagtatttcgtttgccttgttgattacgtagatgtagttcagcccgttcggcgcgaggtcggggcatgtggtgtggtctgagccgggtatctcacggtgtagaaacacgttcacaccgtgtacgagtttcggccagccgtatcggcgggcgatgtccgcgcacagtcgcgccgaagcgtcgtggcaagcctgagtacagggtatgaagtccattccgccctgatgctcgatgctgatggtctggcagttgctggcatggttgctgtcggtccatggcgcgtcagattcggctacgtactggtgtatttcgccgttggggccgataccgtacgtgcttgatgcctgtcggttcgggttctgaaacaggctgtccgtgccggtcaggtatccggccatgatgtgcaaggtgatgcgcgtcaccttgtagcccaagcggccgttgtagtggttcgggcttcctatccacttgatgccatccatgttttcctttcaattgtcgtgtttgaacaaatcttctggcgggctgggtggtggcgggcctagccctttgtagatgtggtcaaccaacgcgcggttccattgccataggcgttggttgtcggcttgcatttcctgagccagctggtaggcttccagccggttttttgcggcggcgaacatgttggtcgtcatggctccgccgattgttccggccacgccgacaatcgccactatgattgcttcgctcatacaaggctcattttccttgttccgtacacttgggtgatggtgatgaagtcgcccatggatgcgttgttgcttccgaccgcgttgacctcgccggcctggtaaacggtcgatgtgctgcgcttccatgtgttgattgtctttccgtcaatcagatagcagcggtttttcacgtagaagtaagcgtctccgttgtagaagctcgtggtgagcgacacaatcttcttgttcgggttggctacgtccatggacgcataaacgttgtcgttgcttttgaagcagatggtgagtttctcgaagttcgccgccgactcgttcagggagattgcgccttggaagacgttgttgtcgttgtcgtacaaggtcacgtagttcgatttgatgttggacaacagggtttcgagcgatgccacgcgcgcggtgagcgcgttctggtctccgccgccgtaatcgaatttcgccagtactctttcgatgccttcggcctgttgctgaagaatatcggggagattccttatcggctcgttgtcctcggggtacgggaaacggtatttttccgtggttcctactgtcatggttcctcacctattttcgatacgtagcgcaaagcgccaagtttccaattgcagtcagcgaatgtggccgtgctggtcatggccttcatctgggcgcatgtcggcgtgcccgttttggtgttgacggcggggaaaagccgcgccttatgcgtccagtggcttttgcggttggtcacgtcgtatgtgagcgtgccgccgattttcgcccacggcccgtatgtggccggtgccgaacgctcgaatttcgagccgatgaacaccatgaccgttgggaggcagtacatgaaaagctggttgagcctgtcgcccctgaacgtgacttcggggagccgcaaacgccggttgctttccctgatggtgttcatggcaagcgtgaagtcgatttttccggggtcgctgtccgcctgattgtcgtactgagtccaattggcctcgatgctcaggcatgtgtcaccctcacgcgtcgactgttcgacctgaacggaacggctgccgtcctgattgaactcgaccgtcttgtagccgctgccgttgcctcggtgcgaatatttgaactcaagttgcgtgtagtattcgtctgctgcgctcaacgacggttcggggtcgataatcacgtctccagcgtccgcataacgactgtcaacgcctatgtctgtgttgtcgtcgcctgtgcggatacgcgggccggtcagcacggtgtcaatcgtccatcgaagatacagcgcctcgaaagacggtattttcttcgggtcggcgctttgatacgagatgtaggctgtgcggtcaatctcgaactggtatttgctgttgacctgtcgtgtccggcagctttgcgcccagtcgatgaagctcttgcgttgttccgcgctgaatggcgtggggaaaatactccacggccaccagtagttttgcacgccgtcgtagtacagccacttctgcaccgtttctgatgtctgcccttgcatccaccattgccagccgcgcgccatgttcgcggtggtgttcgtgttcggcccttgtcggcaatcggtcttcaagatatagattctgtccgatgctgtcacgctcaaccggtttcgtccgccgtcatggtcgagaatctgcacgtcggtaacgtagccgtcgaacaggcagaagttcaccggtgtggctgtgttcccccagtcgggtgagatggtgagcctgtggcccatgagcaagtcgcccgacttactgaaacggtctgcttggtcgataagcgtgattttcagcacgttcggcgtgatatcgtcccacgggttcgacacgccccaagtgatagtgaaggggcttaacgccacgaggtcggcgctgtcgtccgattgcaaaggcaagggcgataggtcaagatacacatggcatgtttcgggcaaagggttcgcgctgctcataacgccagctccttgccgcgcacgcgcgcccaacggtcgagactgttgacgatttcaccggccaccttgtcgttgtcaaggttgccgtgagcgtccacgctgatattcacgttcaccgtcgcggggcgcgtggtgtcggcacggttggcgggggcaacaatggcgcgggcgagattgacggtaggcgctgtgtacgtggtcggcgccgatggcgtgattgcgcggctcatggcgtactggcgtaccggcagcgcgtaggcggcggcttgcgtgctgtagctttgggcgctcaaaccgcttgcctcactcttggcaccggtaatcttgccccacaagtccgaaacccacttgaacgcgcccttgattgccccaacgatgctgtcgaacacgcccagcaccttgtctttcaatccggtgaagaagccgataatacggttgatggcgtcttgggcggggccgggcagtgcgttgaacatctgctgaccggcctgtttcatgccgtcgaaattcaacgtgaacatgctcagcagcagcttgaaatagccgcccagaaagtcggccaccggctggaacgcctgacctatcgcgttccaagtgtcgatgccccactgcttcaggctggcaccgataccggcaagccaccccatgaaggcgttccacttgtccgctatccactgcgccgccgccgctccagcggccttcacgttgtcccagttcatcaccagcagcgcgattaccgcgacaaccgccagaatcacggcaatgaccggcagaaaagcgagattcaccgagccttgcgcgattgccacgatggtagccacggcgctgtacgcggtcatggccgcgttcaacgtgatgataaccgccgcaaccgccgctatgacaccgataagcggcaccagccacgaggtgttctgctgcacccaagtggcgaactcggcaagtttcgccgccacctgtgtgagaatcggcaacaatgcctcgccaagagtggccttggtgttctcgaacgccgccgccatgcgctgctgctggccctgtagggtgtcggactcacgcgcgaagttgcccgtggccttgccgctctgcgcggtgattgcggccagcgtggcttgcatcttggcgttacggtcgcccgacttgtacaggtcacccaagcccatcgaagccgcttgggccttcaacgtagcatcgttaagagagatgccgtatttctcgattgggtccatttcgcccttgagcgcggcgctgagcgcgtccacagcgtcggcggtggtgccgccgaacatggaagacaagtcggctccaagggtgataagctcgttggtcttgtcggccgattcgtccacgctcatgccgaagttctgaagctgggagccaaccagcgtggcgaactcgttgtactcgttcttgctgaggcccacggcctgtgccgcgttgtcgctccactgcttcatctttccggcgctggattcgaacacggtttcgacgccgcccaccgactgctgaaggtcggcggcagcgtcaacgcacaccttcgcgcccgcgccgatggcggcgagcgaggcacccgccgcaaccgaagccttgttcaatccttccttgaaggtcatagacgcggccttggccttgtccatggcggccacggcgcttgtcgcgtcaccgatgattcggatggccaacacggctgatttcatgtctcacctcacctcacctcgttctgcgtcgaatgtcttcggtttcctcggcctcttgccgcaagaggcttacacaggtgccccagtcggcctcttgcggctgtgattcacgccgccatgcccacggcgtgccgccgaaacgcgccgccagtacacagctcagttcaccgaagccgccgctgtcccaccggtcgcaccggtcgaaaaacccggcgcgtccgccatgtcgccggaagagaccggcacggggccgttcatggtttcggcctgttcctcggtgtcggtcgggtcgttgttcatgtccacgacggaaaccacggtgtcggcccactgctcgaacggaacagaggtagcgccgatttggcggcagcgcacgtaggcggcgtaggcgttgagcttcaccaccgcgtccaacgcgctgccccagcccttcgccttcgcgtgggtttccgcttggcagcgctgccacatggtcacgcaaacctcgtcggcgtggccgtccaagtaggtgatacgggtgttcggggtcttggtctcgttgttcatttcgttaatctcctgtcgtgattcggttgatgattttctgcaccgcgtccgcgtagagttgcgtccactgtggttcggtgttcttagccgccttgttggcgaacatggttgctttgatgttgtgcttgggccagccgtaattgattacgcccgcgtacttcaccttgccgttgttgccggcgcgcaccacaccggccttctgtgtggcacccgcgcgtatcgatttcgcgagacggcccgagcgttgcggggccagtgccttggcggctggtgccacgatttgcgcggcctgttcgttgatgtcgcgcaagtccttcaggtcggcaccggcctgtctcaggcccttggcgagctgtgccgcgcccttgagctgcaactggctgttgccgccagaggctatgtccgccatgattaggagtgggacgaaggcgtgtagtctacggctttaacgtcgatggcgacgaacgaaaaatcattgctgttcttcgtcttcacgtcgccgccgaactggatggacgcgattaccacgttgccggtgagcttcacgctgccctcaaggttcggcacccactcgaacggcagcgtcttaccgctgttcttcaggcaccagacctgtaggccgttcatggagaagtcctctttgattgaaccggtcagcgcccaagtctcggtctgcgaaccgccctcggtgtggccgtccagaaaattgtcgttgtcctcggtatcggtcgagggttccaacgcggtgttgataacgtccgcgctgaagtcctgttcgctgcccgacgcgccgattttcagactgccggggccaagcgtgcgtgtctttgccatgattgtgttcctttcagttgatttcgagtgggttcagggtgatttcgtaggccgctaggttgccgacacccgcgagactgtaggtgacgggtttagcggccttcatgttcaggtggcgctcatgcaagcgctccaagacggggataatcaggtctaggctttcaatctgcgtggccgtggtgcccgcgataaggttcaccgtccactcggtgttgacgaactgccagccttcgtaggtgatgttcggcgggtcgataagcaccgcgactttgcccggcagcgggcgggcttcctgagcgtcgatggttacaacggccacgaggtcgccaatcatgtcggtgagcatgtccataagcgcctcacgttcgctgataatccggctcatgcaatcaccagcccgcccgtgggtacgccagccgcgttgagcttgggccacacgctgcgcaacgggtcgcttgacaccctgtagggttcaagcgagccgtcgccaacgtccatgacacccaagcgcgcgtcacggctgttgtacaggtcggcggcgcaactcacgatgcagtcggcgcgaacggcggcggaaacgttcgcgccgcctatagcgctgtcaacgtactcgattgccgccgtcaccttgtccaccagccggtcattgtcaccggctggcacgttgacttcggcgcgcaagaggcttacgagtttcgcggtatcgtctaccataatcagttactcacgctcaggcggccttgaacttgaccgggataaggccgtcaacgttcgtggcggcaaccgccatatagccgtacaccgaatagttttcggtgagcttggtcgggtcgccgtcgctgagctgcgtggggccaccgctttcccacaccgtcaccgattcggggtcgatgaagcacgccgtgccagccggggccttggggagcatctgcaccggcagacgaaggaacttaccggcgatgccggtcaggtcgaagtcaccgatggtgtcggaaccgtcgcccgagaggtcgaagaagcgggaaccgctgtccttcatggcgatgagcgaggccataacgtccttgctgacaccaagacgggtgaggttcacgttacggtcgtcagccagttcggcggcgtccatgatgagagttgcccagttgtcgatggtcatgttagcaagcgtggcgggcgcgtcgagcttgttggggttactcgtcgcgtcacgctgaccggcgatggtcgtatacaggtagttgcgcacggcggtttcggtcgccttcgcgtaggcgttgcgcaatgcagccaatgccgtgttgagcattggggtggtggaacgctcgattacctgacggctcatggtggtgtagccgccgtaggtgtcgattgacacgctcttggtgccgaacgtgaccttgccgaacttgagcgcgtcgccttccttcgcctgtttcgtcgcgccggtggtgtcgatgctgaccacgttgtattccatggtcatgcccttgtccggcagtgtgtcgtgcgtgagaatgttcgttaccttgcggcgcatttcgataagccgcaaatcgtccgcaatccaagcgctcgtgttgccggtgtcgccggtggcgataaggtcgcggcattcgtgcatgagcgtcacggctgcttcgtctccgcgagagagcgcctgtagatagtctccggcggtacggtattcaccgcccaaggtcttgtgttcgggggtgctgcccttggcgatggcggctttcatgctgcgctgttcgtccttgatgccgtcaagcatattctgtagttccttgtccaccttcggtgcctcgctttcggttgattggttgttgttggtggtctgctgcgcgttgcgctgcccggtgattttcgcggcctcgtacgcgggccatgacaccaccgacgtttccaacaggcgcacgcgcttgcggtgcgtgatgccctgtttgtcggtctccgactcgattgggataaaaccgacgctcaacgagtccagcgcgccgtcacgcaacagtgctacagcgtcgcggcctcgctgcgtgtccgagattcgggccgtgatatgcaagccgtcttcgcggggttcggcgttggtgattcgtccgatggtctcgccatgctcatagctgagcttggcgctgtccacgtcatcgaacacgcaatcagggtcgaacgtctcttggccgtcccatgtgtcgataatctggccgaacggcacggcgatgccctcaagcgtgcgcccgtcgccttcatcgctgctgcgaaggcacacgccacgcaagccgatatcgattctgttcactgttcgtctccaatctgctggggttccggtgccggaaccaacgggggatatgattcacgagcgcgcacctcgttaacggttatccacttggaatcaagggcggtcttgtaggcgttgaaacggtcgctcatgtcggcgcggcggctgctgtcccaatcgaagcgggcttcgcggccacgcggcaacaggacgttgaaaagctcctcgatttcgccggtgtaggccgaaagcgtgtagtccgaaaactcaatccagctttgctcgatgttgctgtaggtgaggttcgagccgtcgacggcggcaagcatgatgcttgccggaatgccgagcaagcgggcaatctgcgtggtgtcgaacttctgcgtctccaaaaactgcaagtcggcgggcttcatgtccaacgggacataggtgagattgttgcccagcaccttcacgtcggcggcggtgccctgtgccttccaatcgttcttggcctgtttcgcgtactcgggtgtcaccttctgctcggtcttcaagtagcccttcaggttcgagctgtccgtgtagaagcgtgccttgtagtcgcgggccattttcgcgccctcaacctcttcgcgggcggcgctgattgggccaaggccacgcaaacggcccggcacgttcaaaaacttgcaatggacgatatccgtggggccgtaatccttgcccaagtagctgtatcgcagtttcggggcggcggggtcgcttccatcgtcggaaacgacaaccagagacggcggcagcacctcacacgacacgatttcaccgccgaaacgcaccaaccgcacgaaggcgttgccgtccaacgccatgcttgccaccatgtccgccagaaagtcacgacgggaacggttcacgtccggctgggccacgagactgctgatagagtccagtttgagaccggcgcgcgtctcgtaaatcggcaagccggttatagctgtctgcaaaacctgaatgccgcgaaacacggtgctgagcgccaacgggtcatgggcggtcgcacggcttggcggcatgatgccagcgggcacgtcggccaacgcctcgttgccgcgcttcatcacgccaccggccagcttcaaacgctgccacaagctcaaacgtccattcatgccgcccagtatgcgagagtggcgcgccacgggtctagcagcgtgccgccaactgccgccaactgccgccaactgccgccaagtaccgccaacagcaactaggtggttgttgtcagtagatttgcaatgggccgtcttcctctggcatgtgcgcggctccccacgcggccaacatgcacgattcgagcgggctggtgagaccggtcgagccgcgtcgggtcacgcgccaagcgtcaccggcccatgtgcgcgcgctgttggccgcgcttgcgtccaagtccgtgtcggcggcgtgaagcacggtgccgttgctcaaaccgctcacataggactggcccaccgtgagatagtcggtggcggtcaaatcgcagaatcgcacggtttcttcgtcgcccatgtgcctcaaccggtcggcaaggtcggcgctggtgccgcgtgtgtcaatcaccaacggcgcggcgtatgtgtcgcacaaccgtttgatttccgcgggcgcgtggccggtgccgtccatgattttgagcagttgcgtggtcacgctgccgtcatcgttcacgatgcccgccgaaatgctggtgtgggtcgcgtccacgtccacggcgacaccgaacaccaccggtcgcgcgcccagttcgctcgggctgataggcgacgccgtggttgtggcccaaaggtcggcgtcaatcaccctgtcggtcacgccttcgtctcgctggttgccgaatgcgcgcgcccagccgctcggattgttccgccattgttcgcggaagtccggcagttggtcacgtcgccagagcagaccggcggcggggtggtagcgcataatcatgtcaaggttctcggggtcagcgtcgggcggcaacccgaagtcaaaccaacaggtacgccgcgattggtcgcccgctcggcattcgtcaagtttccggttgaaaaacgtgctgtccgccgtgccctcggtcgaggttatccacagctgtggctgcacgccggtggcttgcaatcgtgtcgccatggtcggcacgaagccgtcaagaatcatgttgccggtttcctcgcttaggctaaacgcctcgtccaaggtcactttgtcgccctgtacgccgtggcctgataccttcgtcaccgatttaggcatgatgatggaaccgttacggaacggctgggcctcgctgccgcgtcccatgtacggcctaccggtgatgggggcgagcggtgaggcttgcaaagtcttcaggaatttcttgaagtggtcgccagcgtccttgccggtctgggcgagatagtagacataccggttcggtccccactgcgtgttccgcgtgtcccaagcgtccaccagcgttgacttgccgcactggcgcggcgtgctgagaatcaccgtgtcgtagaagtatgttccggtgtcggggtcgatttcgccggccacgtcggccacgagccgttgccacggcagcaagggcgtgcccagcagttcggcaaagcgggccactatagcgccgtcagtccggcgttccaagttccgcgcggtgccgccgcgcattggcacggtcacgccttcgcctcggtcagcagcgcggccagattctcgtcaagctcgggggcctcggggtacagttcgcgcaaatggtcgaaagcgttgttatagctgtctgccagcgtcgaaatgttcttgcccaacgtcagatagctatcgatgttgtgcgctatcgcggtcatcagcgccgcgtaggtgtcagcggcctcggtgacggtctttccatcgaagaacgtcttgaggttggcgcgtgtgcgcgtctccatgaagccctgacgattgccgatttccgagaatccctcaaaggttccctgaattgccattgttcgcctcttttcgttgcaattccgccgttttcaggctttttttatttttggttgggggtgaaaaaaacttggcgcggggtgatttccaaggccgtccgtttaaaaaacgagcctcaccactcgggccgtgaagcaacagacgttgaacccgaacgaaggccaagggcaacgagcttcgcacgccgcgcggcctgtctcacgtccacgagctgctgcgagagatgcagcgaataccattgccgcgccgtctgcctagcgccctcgttgcgctgctgcgtctccaaccggtcgaacaccacggcagcgccggggtcaacaacgtgaatgtcatagtcgagcgccaaccattcctcaagcaatcgagggtgagcgtggctggccggtatcgatttgataagccacacgtcaacaggcgcgttcatgcgcaccagcttgttgtacgcgccttgccatgcgccttggcccgcctgaatcaacggggccgtgggcttggccttcacgtcaccgccaagggtaagcgccgaagccaactggtcgaagtccagcaccagcgcgtcactcgccgcgtgttgcgccacataggaactcttaccggcgcacggcgggccgataaccgcgtggatagtcgcgccgtaaccggatagcacacggttgcttcggctgatgttgcacgccttgcacgcgcgccgtatgttcgccaccgtgccacggccaccggccttgaacggtatgatatggtcgtcttcctcgccgtggtgcgtgcataccggcaattccagccaacagtcattgccccatgtctctatgacctcttcgcgcacgcggcgcggtatcgttccacgctggcgcttcaatccccttgtcgccattgtcacgccttgcccttctgctccatcacccaccggtcaaggtcggcaacctcgtacaggcacggcgaattgatagcgtcaccggccttgaaccagacggggccggtgttgtccgccctcatgcgctccatctgcctttgtgaacgatgcaagtaccgtgcggcctgagcggtcgtgagtttcgcgcgcgggttcattcagcacacccccgcgtaagccttgagcgaggtcaacaggtcggcgcggtcgaacacctgaacaccggcgcgcttgcgaggccgctgcacgtagccttcactgataagctgctgcaacacatggtctccggtcgggtcagcggtcggcgcaatcttgccgagatgcagcagcttgcacaccatgccacgctcaatcgagtcggtgcccgtggtgtcatgctccaactgggcgacgttccacctgatagcgttcttcatgtccttcgtccgctgggccttattcgccggtgactgacgcttggcacgccgggaaatcggacggccggaacgtttgtaagagactgcataacccatcttgttgcctcgtttcgtcgtaagtgcttggttgatgttcttgtgaatcgtgattaaccgggttttcatttcatgtgaccttcgggtggtgagcggttgagcgggggaacctaagccggaaacaagcgttgaagcgcaaggcttcgccgtcgtttccagtgaggttcgcccaaattgcttcgtaacggagccgcgtatatcgctttgaggtcagcggccgaagccgcgcgcaaggtcacgacaagaggcccgccacgtatgacggtgctgcaccctgttgcgccctgacaatgcgccccaagtcgttcagtaacccgcatggtgtccccgcgccgtcttaaccacgcccccacagggcgtgtgtttgtaacgcggtgagcaagccgcgctagggtactttcaccgtgctacgggtcacctagagtcgcccccgattacggcacattcagttatcggcacgcctaccgtcgtcttcggcggcgcaaatcgtcctgagccaaagcgtcgttgatggacgcgcgtagcgcctcaagagtctgtcgggtcgccacctgattcaacgcaatatctccgctgtcagaatgaatctcaaacaatcccggatactcggggtgagcgttcgcccacacgcgcgtaggtgtctggaacatgctcatagttcggcctctactttcaccgcgcccctgtaaccggcgctaatccacatggcggctcgggcactgaacatggcaacggtcacaagcgcgaacgccagcaccgcgaacggtgccgcaagaacggttctaatccctctcacaatcggccccttcctcggtttcgagccatacgacggcggcagccgccaccgcgaagccaagagcgataagccacaaccgccacgaaagcgccaccacaagcagcaccgcgcacaacggaaccaacagaatcttttcccttgtggtcatgccatcacctcgccgtcatcattgagagtcatttgcaccacgtccggtatcggcctgatacggcacaccagttcgtaaccgtcatattcgggaatcttgcccgtggtcagaacgattgccgggtcttcgtcatcgtccgtgaagcagcgcacggtgccgcacgtccatttcacggcacccttcgtggtcacgagacgcataaccgcgatatcgcccggctccacgtccttgggttcctgtgagacctcatagcgcacttctacgccccttcctgattgcctcggcaatgtgctggttgatggtcacgaggtcgcccagactcatgcccgcgaaagcgaagtaatcgccgtcaacggtgattctgaagccaaacgagttgtcaacctcgaaatggtcaacgtcgaaatggttgtgcgactccttggtgaaaacaggcatgtcacttcacctctaacggcttgcggccaagaagaacatcagtgctgacgttcagcattttggatagcgcaactacttcgtccgctgtaaagcgggtatcaccattgagctttttcgagaaggacggcggcgtgatacccaaggctttagccgcgtccttctgcaaaattccgcgccatgtaagcaacgtctttatgctcagcgtggcggaattaagctcagctttattagatttcgacatgccttgatttatagcatgagaagttaagctgagcaatccggcgtgtcgcagtggacaattgaattaggctgacgctaatctaattgcatgacacaaacaattattagccctcgacctacagcggaatcgaggcaaagtgaaagtctccaagagatagtgacgcggaacatgcgcgtggctatcgcgctgcgcggctgcgcgcaaaaggacttagcggctgctatgggaataacgcccgccagcttgtctcagaagttcgtcggtaagaccttgtggaacctcgtagatatagaaaaagcctcaggtttcttcaatgtgaaacctgaggcgttggtagcggggcatggatttgaaccatggacctctgggttatgagcccagcgagctaccgagctgctccaccccgcgtcggcttgtctctcagacagctctatctacaataggtgcagattccagaaagtcaacatcggcgtgtcgcgtcatcttcccgcggttttaaaacgtgaattggctcacgcagcgaggggtttggggcggagtcggagtcggggtaataacgcgccataaatggccgttataggaatgccctgaaccgttatcccgaatattgacataataggaacatgcctatcaagatccccagtggcctgccggccagagatatcctcgattcggagcgcatcttcgctctggagaagcccgaggcggagcgtcagcgcgtccgcccgctcaaactggtgatcctgaacttgatgcctaagaaaatcgagactgaaacacagctgctgcgtctgatttccaagtcgccgctgcaggtcgaaatcgacttcatgaagacctccacgcatgaggccacgcacgtttccgccgatcatctcgtcaagttctacgaaaacctcgatgcgttcaaagacaactattacgacggttttgtggtcaccggcgcgcctgtagagcatatgccgttcgaagatgtggactactgggacgagttcaagacgattctcgactgggcctccacccatgtgttctccaccatgtacctgtgctggggtgcgatgggcgcactgtactaccgctacggcatccacaaggtggattaccccgagaagattttcggcgtattcccgcagtacctgcaggatgaatactgcttcctgaccaatggcttcgacgagattgatctgcagccgcactcccgcctcgccggcgtgaacgaaaacgaggtacgtgccaaccatgaccttcagatcttgacttgggggccgcagtccggcccgggcctgatcgccacgcgtgacttctccgaagtgttcgcgctcggccattgggagtacggcaagtacacgctcgccgaagaatacgagcgcgatatggccaagggcatgaccaacgtgcccttcccgaagaactacttcccgcatgacgatccgaagctggaaccgttgttcgcctggcgcgcccacgccaatctgctgtggcgcaactggctcaactgggtgtaccagaccacgccgtatgacctgaccgaggtgccgcagctcagggctgagaagaagctcggtactgatcgttcgattcggcatgagccgggcgggccgcgccaggatgatttcaagccgtttgtgcatgacgggtatggggtgattcagggctgagcctacgatctcccctcagtcgcctacgacgacagctcccctcgacggggagctcctttgcttctccttcacggctcggcccatcagagggagctactgttggaggttgcgttcgtagcgtggacggttgttcgtccacgatgtggacggcttgatgaacgtaatgccacacatccgcgtaatgcgaccaatagtgcacaacgttcgcgaaacgcccgggaaaaccttgcagcagtagggatttcaggagactcgccggtataatattgacattgtctagacgcaggcaaataatcactcttcagtcattcggagccgaatgcccagcgcagactccgtgtccatgcccggcagactccacaccgaggagacaaaaaaagacgaaagtaacgagcacgtcacatttgcctgcccggtgggtttaaactgacacctgacattgaagaagcaggaggcgtgatatggtcggttcgctcagcgcaggattgctgttggctgacgaggcaggcgctcatctgccctcggttgatgacttccttcccccggagattctgttccagggaactccgtttgccatcaaccgcattattttgattcgtatcgtggcaaccatcgtgctgttggtggtgctcggcgtgaccgcaaagcgcgccaagctcatccccggccgttggcagggcgtagtcgagtacggtctcgacttcgtgcgcgacaaggtcgtgtatgacgtgatgggtgaggcccgtggcaagcgctacgtgccgatgatcaccaccctgttcttcacgatcttcattttcaacctgtgcggcatcattccaggtatgaacatggcggccaacgccacggtggtcatgccgctcgtgttcgctgtctggacactgatccagtactggatcgccgccatccgctcgcagggcctcggccactatctgcgccacgagctgttcacccccggtgtgccgtggccggtctatttcctgctggctccgatcaacctgcttgagctgttgatcatccgcccggcctccctgaccatccgtctgttcgccaacatggtttccggccaccttatggtcgccacctgcctggcgttcgcacagttctggatggttgacgcggtcaacaagctgcagggcatcccggtgggtgcgctgtggttcgccggtggtttcgccatgacctgcttcgaggcgttcgtcgccttcctgcaagcctacgtcttcgcgattctttccaccgtgtacatcaacctgagcttcccggaagagtgacgggcgactaacccgccgcttccggtccccggtctgggaaaatcgcagaccgaccaaaccccaagatttataacgtcgccaagtacgttagaaaggaaacacaatggatatcatcaccctcgcagaggtcgccggcaacctgtccgtcatcggttacggtatcggtactcttggccctggcattggtctgggcatcctcttcggcaaggccatggaatccaccgctcgtcagcctgagatgtccggcaagatccagaccatcatgttcatcggcctggctctggtcgaggtgctggcactgatcggcttcgtcgccgccctgatcatctgatctgcgcagatcaacagacgaaaaccgattatgtccatcactgaaaggagggcttgatgacacaagcagcaagcgggattgacctgttcattcctgaggtttatgacatcgtatggtcgctgatcattcttgtcatcgttgcggtgttcttctacaagttcttcatgccgaagttcaatgcgatcttcgacgagcgcgccgccaagattcagggcaacatcgccaaggcggagcaggctaggaaggacgccgacgaggccaaggccaagtatgaggcccagctgagcaccgcccgtgtggacgccgccaagattcgcgacgacgcccgtgcggaagcgtcccacatcatcgccgacgctcgttcccgcgccgagtccgatgcggcccagatcaccgcatccgcacagcgctcgatcgaatcccagcaccagcaggccatcgtctcgctcaagggcgaggtcggcgcacttgccaccgccctggccggcaagatcctcggtgccaagctggaagacaacgacgtgcagtcctcgatgatcgattcgatgatcgacgacctgggcgccaagaagtgaccgtgaccatccgtaaccagaaagggaggtgaccatgcgaggagaggcatcacgtattgcagaccgcgagtcgcgtgattcgctggccccgaaactgcgcgacacccgtgaggacgcgtggcggatcggcaacgaactgttcacgatcaccaaggtgctcgatgacagcattcagctggagcgcgcactgaccgacccgtcccgcccggttgccgacaaggtggccgtcctgaaggaactgctcggtgacaacgcgcatccgatgaccatggagatcatgactgacttggtctcccgccgttggagccgtgcgcgcgacatcgccaacgcagtggaagacttcggcgtggacgccatgatgtactacgcggacgccactgacgccacgctgcaggtatccatcgagctgtccgagctgcattccgcactgctgaacctgccggtcgtacgcgccaagctgtacgactaccaggccaccagcgaggcccgtgtgaagctgttccgcgaggtgttctctggcaagaccctgaacaaggtcaccatgaggctcgccgaacacgccacttgcaacctgcgccgccgccgctacttggagaccatccagtggctgatcaacaagttctcccgccacatgggcgagtcgatggtcaccgtgaccaccgccaccccgctgaagaaggagcagatcaagcgactggtcgaggtctactccgccaaggtgggccgtcaggtgcacatcaactcggtggtcgacccgaccgtgctgggtggcatgcgcatccaggtgggcgacgaagtcacggacaacaccgtggtcgcacagctgcagaacttgcatcgcaaggtgcagacggaggcgactccggcctgaccggccgagccaatccgtccaacaccacacacaagcaaagacttgactgaacaataaccaatagaaggagtgatcatggcagaactgaccatcgatcccgcctcgattcgcaaggccctcgacgacttcgtgtcgtcgtacaagccgagcgacacccccacccaggaagtgggctatgtcgccacggccggtgacggcattgcacacgtgacgggattgcctggttgcatggccaatgagctgctgacgttcgaagacggcacgctcggcctggcgttcaaccttgacgcccgtgagatcggcgtggtgatcctcggcgatttcgctggaattgaggaaggccaggaagtgcgacgcaccggcgaagtgctttccgtgcccgtcggcgacggctatctcggccgcgtcgtggacccgctgggcaagccgctcgacggcctcggcgagatccagggcattgagggtcgtcgtatcctcgaagcccaggcccccgacgtgatgcaccgccacccggtcgacgagccgctgtccaccggcctcaaggccatcgacgcgatgaccccgatcggccgcggccagcgccagctcatcatcggcgaccgccagaccggtaagaccgccatcgcgatcgataccatcatcaaccagaaggccaactgggaatccggcgacccgaagaagcaggtccgctgcatctacgtggccatcggccagaagggctccaccatcgcctcggtgaagcagagcctggaagacgccggcgccatggagtacaccaccatcgtggcctccccggcagccgattccgctggcttcaagtacatcgccccgtacaccggctcggccatcggccagcactggatgtacaacggcaagcatgtgctcatcgtcttcgatgacttgtccaagcaggcagaggcctatcgttcgatttccctgctgctgcgccgcccgccggggcgtgaagcctacccgggtgatgtgttctacctgcactcccgcctgctcgaacgttgcgccaaggtctccgatgacctaggcggcggttcgatgacgggtctgccgatcgtcgagaccaaggcgaacgatgtgtccgcctacatcccgaccaacgtgatctccatcactgacggccagatcttcctgcagtccgatctgttcaacgccaaccagcgccccgccgtggacgtcggtatctccgtctctcgagtcggtggcgccgcacagaccaaggctctgaagaaggtctccggtacgctgaagatctccctggcacagtaccgttcgctggaatccttcgccatgttcgcctccgatctggatgcggcttccaaggcccagttgacccgtggtgcccacctgaccgagctgttgaagcagccgcagttccacccgtactcgccggaacaggaagtcgtgtccgtatggaccggcacccacggcaagctcgacgacctcgacctgaaggacgtccttccgttcgagcagggactgctggactacatcgaccacaacaccgatatcctcaagaccattcgcgagaccgaggaattcaccgccgacaccgaggctgccctcgataaggccgtggacgagttccgttcgacgttcgtctcttccgccggcaagccgctggtcgagaagaagccggacgttgacaaggccgcgccggtcgatcaggaaaagatcgtggcgggagaaaagtaagccatgggctcgcaactcgcattgaaatcacgcatccgctccaccgagtcgttggcgaagatcttcaacgctcaggagatgatcgcgtcttcgcatatcgccaaggcccgtgatgtggccctgaacgcgaagccgtacaccgatgcgattttcgatgccgtgcaagcgttggtggcccacacccatatcacgcatccgatcgcggtgaaggacgagaagaacccgcgcgtggctgttctcgccctcacctcggatcgtggtatggccggcccgtacacctcttcgattatccgtgaaacggagtcgctgctgtcccgcctcgatgcggcaggcaagcagccggagctgttcgtgtacgggcgtcgcggttcgacgtactacaagtaccgtaatcgtgacatcgcggcgacgtgggaaggcgacaccgaccagcccggcgtggaaattgctgaaacgatctccaacaccttgatggacgcctacatgaagccggctgagaagggtggagtttccgaactctacatcgtctacaccgagttcatcaacatggtggtgcagaaggtgcgcgtgctgcgcatgctgccggtcgaaatcgtgaaaaacgagaccaaggtgcccgatcctgatgaagaggcaccggctactgcggatgtcgctccgctgtacactttcgagcccagcctcgaaaaggtactggatgcgattctgccgaagtacattcagtcccgtatccacgagtgcctgctgactgcggccgcgtcggaaaccgcaagccgccagaacgccatgcacacggcaaccgacaacgcacgaaacctgatcgacgaccttacgcgcaagctcaacgcttcccgccaggcctcgatcacccaggaacttaccgaaatcatcggcagcgctgacgcgctgaccaagaaggaagagtaggaacgcatatggctgacaaccagaccactgcggccgagcctaccaacggtcgcgtcacccgcgtccagggctcggttatcgacgttgaattcccggtgggtcatctgcccgacatctacaacgccctgaaagtaacgatcgtcaacaccagcgccaaggaagaaggcgaggcgaaggagaccgagatcaccctcgaggtcgaacagcacctcggtgattccacggtccgttgcgtcgctctgaagcccaccgacggcctggttcgtggtgcctccgtctccgacaccggcgccctgatctccgtgccggtcggcgacgtgaccaagggccacgtcttcgacgtgtccggtaacatcctcaacaagaagccggatgagaccatcaccgtctccgagcgttggcctatccaccgcaacccgccggccttcgatcagctggagtccaagacccagatgttcgaaacgggcatcaaggtcatcgatctgctgaccccgtacgtgcagggcggcaagatcggtctgttcggtggtgcaggtgtgggcaagaccgtgctgattcaggaaatgattcagcgcgtggcccagaaccacggtggtgtgtccgtgttcgctggcgtcggcgagcgtacccgtgagggtaacgatctgatcggcgaaatggccgaggccggcgtgcttgagaagaccgcactggtcttcggccagatggatgagcagccgggtacccgtctgcgtgtcccgctgaccgcactgaccatggcagagtacttccgtgacgtgcagaaccaggacgtgctgctgttcatcgacaacatcttccgcttcacccaggccggttccgaggtgtccaccctgctgggtcgtatgccttccgccgtggggtaccagccgaacctggccgatgagatgggttccctccaggagcgcatcacctcgacccgtggtcactcgatcacctcgttgcaggccatttacgtgccggccgatgattacaccgacccggccccggccacgaccttcgcccacttggatgcaaccaccgagctttctcgtgacattgcctccaagggtatctacccggctgtggacccgctgagctccacctcgcgaatcctcgatccgcgttacgtgggccaggctcactacgactgcgccaaccgcgtcaaggcgattctgcagcgtaacaaggagctgcaggacatcatcgccctgatcggtatcgacgagctcggcgaagaggacaagaccaccgtgaaccgtgctcgtaagatcgagcagttcctcggccagaacttctatgtggctgagaagttcaccggtcgccccggctcctacgtgccggccgacgagaccatcgaagccttcacccgcatctgcgacggcgtgtacgacgacgtcccggagcaggcgttctccggcatcggcggcatcgacgacctcgaagagaagtggcacaacatgcagaaggaactgggtgcgtgatggctgcggaaaaaaccacgatgaaggtcaacatcgtcgccgctgaccaccctgtgtggcacggcgaggcgacgagcgtgaccattcccgcctctgagggcggcatgggcatcctgcccgaccatgagcctgtgctcacggtgatcaagcagggtacgctcaccgtggttgagcccgatggcgatcgccacatgttcgaggtgaccgacggattcatttccttcgactcgaacaaactcaccgtggcggtcgagcgcggccacgacgtccagtactccggcaccgccgagtgacctgaaccaactccttaaggggctctctggttttccagagagccccttttgctatgtatgccatgtgttgcgctacagtggtggcctatgcgagttattgttgccgactgttcggccgagtattcgggccgcctcaacgcctcactgcccctggccaagcgcgtattgctgatcaaggccgattccagcctgttgattttctccgaattgggctcctacaagccgctgaactggatgaccgcgccctgcacgattcgtgagatcgacccagccgccaaatccgcgcaacattcccgggaaagtgtcgctggtggggctgtggatggtgattctgcgacgcattccccggaaagtgtcgccgctggtgagccggaaaaggtgctacgtgtcagcgccgacaagggttcggacattcttgaagtgacgctgcagcatatctattccgaccaaacctatgatctgggcgaagatccgggtctcatcaaggatggcgtggaagaccatctgcagcgctatctggccgagcaaatcgagcgtatcggcaagggagccaagctggtgcgtcgcgaatacccgaccgccattggcccagtggatattatggccgtgaatgccgagggcgagcatgtggctgtggaaatcaaacgtcacggcggcattgatggcgtcgagcagctgactcgctactgcgaactgctcaatcgagatccgctgctggccccggtgcacggcatcttcgccgcacaaaccatcacgccgcaagcccaggtcttggccaaagaccgcggcttcacctgcctcatcctcgattacgacgatatgaaaggcaccgaggacgacagtctcaggctgttctagatatagcaggggctccctcatcagagggagcccctgctatatcttttagtacgcggcgagaatatcgattacgaagaccaacgtggagttggcgggaatcgaaccttgctccttatctccataggcctgatctggcggaatcaccagcagaacctgagagccgacggtctggccgaccagacccttctgccagccctcgataacctgatgctggccgctggaatcgctgaacagatcggcgtcgattgtggaatcgcgatcccaggacgaatcgaactgcttgccatccgtaagccaaccggtgtacttgaccaccacggtgttcttgtcggtcagcttggcgccgttacccttgatcagcgtctgcgagatcagcgaatcaaccgaaccctgaccgttcatgtcaatggacggcttgccattcttggctcgcgtcaccttcggcagattggccggcacatccttgacttcctcgccagtggccttctccaagtccttggacttggacacaaacgtcatcgccagaatgtaagagtacccggacgaatcctgagcgttgacgccaaagccaatcgtggtgttgatcttggcacccttgatctggttgtagtaggtcgaggagagggtcttggaatccaccttcagcgagcaatccggcgtgttcttggtccaggtgtccatgagctcggtgccgtctttaacgttgagcgcgatgccttgggcgcagacgcggtcgccctcctcgattacgtcgccatcgcccttttgcagcaccacataggagccgtcggacacggtcatcggcgtattaaaggagatggtcggcttctcgccgagcttgcccttggcggtcacgccggcaatttgccccttcttgtcagaagagtcggaagaggatttcgagtccgagctcgaactggagcaggcagccagcgatacgcacatcgccagcgagcaggcaagggcaacggccttgccgagaggggataacatagatttaacagacttacgcatgacacaccaccctactggtgaaccttgattttctgcgctcctaggtaataaacaggtgaagattgtagaatggttaagttatgagtgctgaagaacagactacaagaccggataagggcgccaagcgtccatcccgtcatgccaagatcatgcgtggagtggtgacgcctatcttcggtctattggccgtggcggctgtggtgttggggtacatgaatgccacgatatggaagccctccactgaaatcaccgcttccgcaaccatgagcggctcccggtatgccgtcactgatccgaatgtgctgaccttgttggatcagaacgccacgataaccgtggactcgggatcctctcaggacgaggcgtgcgtggcgttgggtccgtccaaggatgttgccggatgggtcgcgtccgagaagtcctatacccgtatcaccggattggcgtcatggagcgagctgagcacccagaagggaagcagcacgagtcagggagcgcctgccagtgccgatgacgcggtggcgttcaaggattccgatatgtggactgccgtgaaatgcggcaccgggtccgtttcgctggagagcaagaagaccggcgcctcgacggtggccattgtggatttgggcgaaaatgtcaccaacgccaaggtgcagctgcactgggtgcgctccgaagtgccggactttgcgatgccgttctatctgtccggcggattgctggccgtgctggccgtactgtgcgcctccgtgttcgccatgccgccgcataagcgccgcaagcgcatggtggaaggcatggcaagcgccgtaatcgaggaagaggcacccgccagcatcgcagtgtccgggaagccggatggtgcaagtcgacgtaatcgtcgccgtcacgccacacatcggcgttcgggccgtgcgtcctcgcaatcctcgcaatctgaagccaccgaaacaccggttatcatcgacccaagttcacgtaacctggtcgccgaccagcagaccggtgccgaaagcggcgctgagaccggcttcagcgccggcgataacgaatcgacttcggtaatcacccctgacgaactgcaggcctacttctcccgcttggcccaagaggtcaataccggagacgactcggccgatgacggacaggaggaaagctgatgaacaagcgatggaacaaactgtgtgtggccgccctcgcctgcgtggcgttggtcgtgccgttgaccgcctgtgaaggccggctgccgacgccggctgctgatacctccaccaaggttgcgccggatttgaccgaggcacaggagaagaagattcgcctgaagattctcaagacgatcgatgaagccgatcaggccaagaatcccgatggatatgcggccgttatgggcgggccccagctggacattcgcatcagccagaccacgatcaaccagcgcggcggcggtatgtccaaatacgcgaccattcccaaggacatcgcccagacggtgattcccatggacgacggatggcctcgctcggtgttcaccatcacgaccaccaccgaagatcagcagtccaagcgtttgctggtcttcgatcaggaatccgcccagcagaattacaagctgatggccatggctcgactgtttgagggggccaagctgccgaagttcgagattccgactattggctcgcagatgggcaccgcaaaggatgagaagctggtggccactcccgccgatgccttggcccaatacgccgatgtgctgcagaacggctccaagagccaatacgcttccaagttcgcagacgatttgctgcgccaggaactggccaataccacggccaaggtgcaggaaggtatgcaacgcaacaacggtacgcaggagcaaaaattcaccgctgtgcctgaacagatgtgggtgatgcgtgctgcagacggtgccggtgatctggtggttggccgtattaacggcgaatggactcgcaaggcaggggatggccgcgaatcgcggccggcttccgacgacgagaaggcgctgttcaatagcgacaagtacaccagcaccatgaaggtcacgtatgtgaacgtggtggccttgtacattccgttggcaagctccggtgagcaaatcaccgcagtgggtgccgaccgtcagccggtaaaggtcgaagcgctgtaattgttgccgccgcccaccgcgcggttaacgcccccaccacgatatgattcatccaccacgatgtcggtaagttttacctttcgcacaatggtgccgttttgagtcacatcgtggtgggcgttttgctacgtggtgggaattccaccgcgtagtggaagaatccctacgtggtgggaatcggcattacaatcaatgtcagcaaatgtgattgttgttgtacgcgaatcgcgtggaatcgggaggcattatggcagagcagcagttcaatccgggagtctcattggcgggcgccgtcgatttggaggcgctgaagcatcaggtcaaggccgagcccggacaagcgggcggcgcgcctgccgctggtgggtacgtgatcgacaccaccgaaaacaccttccaggcaatggtgcagacttctgcgaccttcccgatcctgctgcttctgtgggtgccgaccgatgaccgcctgttcccgatggcccgtgcactgggcgacgcggtgaacgccctgaacggccagattcagctctcccgtatcgatatctcgtccaatccctcgattgcccaagcgctgcaggtgcagggcgtgcccgcactgttcgcgttgattgccggccgtccgatgccgctgttgcagggccttccgggtgacgacgagctcaagcaacttactgacgaggtgattccgaagattattgaggccgccgcgcagtctggtgtgaacggtaccgcgccgtactcgggtgatcctgattccgatgccgccaagagcgctggtgccaccggtgccgtcgcgggtgctgagcaggtgccgccggagcatgccgaagcccatcgtttggccgaggagggcgattacgccggtgccgccgccgaatacgagcgcgtgctcggatccgacccgtccgatgcactggctgcccgcgaacgtgcgaaggcgctgttgctggcccgctccggggccgctgatgtacgtgacgtacgtgccgctgccgccgcagcgccggacgatgtggaagcgcagttggccgtggctgatatcgacatgattggtggccagattcaagacgctttcgaccgtttgctggactttttggccgccgggcacaaggccgatatcgagcaggttcgcaagcgtctgctcgaatacttcgccatccccgaacccaccgacccgcgtctgacccgcgcccgtcgtcgcctagccaccctcatgtactaagtggttttggctcccctctttgagaggggctgtcgtcgtagatgactgaggggagctcacgagcgtactcgattgctcccccccccctaaaccatccgattcttcccgaaatactgctggaaccttggcccctccagcgccagctcctcctcgaaatcatccgcccacttacagaacggacggttggcgagaccatcgttattgaatcgcgcctgatcggtgatttcggtgatgcagaatttcggaatcgtcagattggtaaccggcccggatcgttcggcctcggctacgatgagcggcgcattcggcccgccgaacacatccacgctccagccgtcttcctcaatccacacggaataccggttcttgatgattaccgagccgccgcgcttgatgagttcggccgcgatacgcgtatcgatttcgcgctcgacttcgtagcgcgtgccgcccacggacggacctttgacggtgacatatgcttccgagaaccggtcgcggtattcgtccagcacggccaccggatttacgtcgggcgtcatgtcgacgtgaaccttgcgcgagaccagccgcacgcgcaaggcgtaattgtcggcatgcacgtagtagctctgaatgatgagggtcggggcgtcgccgtcgtcgtattccgccggcagttcgcggcagaagaagcggcgttcgtattcgaagtcatctgtaggttccgacataaccccattgtagagccgataatggcgattttctcgttattttggcgacgtatgtgccgcatgcaacgtgatgtggtgtacagtaaagaagttgctcgggtttgtagctcagtggatagagcgtctgtctccggaacagaaggtcgtgggttcgatccccatcaagcccaccagcatggctttcggctaaccgccggaagccttttgcatattcggcgcgtgcaaggctggtgctggtgtcggcaatggcaaggccggtgatgccggctcgcttgggtcgtggaaaaaccgtccggtttggcgagaacggtagccgaatcgtctggaatcgtctggaatcgtctggaatagcaaggaatagtctgttgatggccgtatgccgggcatcatgcgcgctaaacgcgactttgctcagtagactgctacgtaatcggcattgccaatcgttgctgatcgtgcgattggtcgtagccggtggcgatgtgtaccggcgccggccgcagcaggtgggcgcccccaagatgagaaggagcacaatatgagcgaaaagatggaagccgtagccacttccgaggcgccggccgcgctgggcgcatacagccaggcggtgaaggccaatggcttcgtgttcgtatccggccagctgggcattgatccggccaccggcgaactggcgggcgagaccgctggagagcaggctgcacaggcgctgaagaatattaagcacattctcgacactgccggtaccggcattgagcatgtgtgccgcgccaccatctacctgaagaacgtcgaggacttcaaggaagtggacgcacgttacgctgaggtgttcatcggctccgtcaagcccgcccgcgtggcctttggcaacaacatgattcccaagggcgcgctcgtggagattgacgccatcgcggtggagtgattcgaacgttttcccggcggcccgtctgcgcgcatggtgtgtgcagacgggccgccgcgtattgtgcgacgcattcccgggaatgttgcgctggaatcgttgggcggtggtccgtgccacaatagagaccatggcatccaaaggaaaaccgtcgccgcgttcggccgtaagcccgctgagtgatgagcaggtcaagcgtctggccgcccgccacacgcttgtggactcgacacagtattacccgaccggcccccgcacgcccaatcagccggaaatcaacgcccagaatcccaaggccaccaaacgactgctgggaggggtgtccattgtgttccgcgccagctgcaagaccaaggcctggggcttggaacaggtgccggaaaccggaccgttcatcaccgccgccagtcatgtcaccatgtttgatgtgttcgtgccaatgatgagcctgttccacatgggccgccgcccccgttacatggccaaggccgagatggcgaagtggccattgatcggcaagtggttccagttggtcggcatgcagccggtgcagcgtcattcgggcaaggccaagcagatcgaagagacctcgattgatattctgacgtccggccgcccgctgacggtctggccggaaggcaccgtgacccgcgacccgaaaaagtgggtgatgagcattaaggagggcgtgggatatatcgcccttgaatcctcgcgcagactgggacatcaggtgccgctgtacccggcggtgacgtggggtgccgcctccatcaaccactggtggccatggccgcgcaaaaacgtggtgatgtgctatgaccatgcgctcgattactccgatctgcttgccgacatggactcatggggtgaagagccgcctgccgaggccgtgaacgagctgatgtggcgcgtgctcaaacgcatgaacacagtactggaggaaattcgtggcgagcagttccccgctgaaggctactgggactaccgcagtatgagtcgtaagccttggcctgaagccggcggcccgttcccggctgagaagtagccgcaccggttcccgtacggggagcctaggcgagtagcatggcacaagattgtgccgatgaagttgcgcgacaagcgaaggtaggaatttgatatgggtaaaaatataacggttctcggtgcaggagcatggggtactgctttcggccaagtgctggcggacgcaggcaacacggtgaccatgtgggccaaggagcagcagattgtcgagggcattcgcgatcaccaccacaacgccgtgcgcctgccgtccgtcgaaaagttgccggacaacatgaccgccactggggatcgcgccgaagccgtcaagaacgcggacatcgtagtcgtggccatcgccgcgcagttcgcgcgagtggcactcgtcgaattcaagggactgattcccgatcgcgccatcgtcgtcagcctgatgaagggcatcgagcgtggcaccaacaagcgtatggacgaagtcgtccgcgaatcccttgacttgccggccgaccggttcgccgccatttccggaccgaacctgtccaaggaaatcgccgatcgtcatcccgccgccaccgtggtggcttgcacgaacctcgataatgccacgaaggtggccgaggcatgcaccacctcctatttcaagccgttcgtgaccaccgacgtcatcggcctggaaatgtgcggcagcctgaagaacgtgaccgcgctggccgtgggcatggcccgtggtgccggctacggtgagaacaccgcagccatgatcgaaactcgtggactggccgaactgaccgcgctgggcgtagccgctggcgccgatcccaagaccttcttcggcttggccggtgtgggcgatctcatcgccacctgtggctcttcgctgtctcgtaactatatgttcggcgcgaatctcggcaagggattgacggtcgaagaggccaccaaggtcagcaacggtgtggccgaaggcgtgcccaccacggatgcggtggtggctcttggcgatcagcttgatgtgccgaccccgttggcgtatcagatgagccgcgtgctgaacgaaggcatttcctgctcggagatgcttgccggactgttcggtcacgaggttaccggcgaataacgagagaagcgacgtatacgtggcgtatacgttgtacgtgcaaagtcgcgtggcgtatacgtcgttgacgtgcacgagtagactggtgtgcgtctcttgtgcgcggcgttccgagcgcggttcggtccggttggcggtgcaaagcataggcttgaaaacggttgtagtttcaacaaaaggatggttatggccaagaagcgtgttgtggtgctctatggtgggcgtgcagacgagcattcgatttcctgcatctccactgccggtgtgctgggggccatggacactgaacggttcgagccgattccggtcggcatcaccaaggacggcaagtggatcatcaatggcgaagatccgcgtggctggaacttggacggcggcgagctgccgaccgtaaagatcaccccggaatcgcgcccggtgatgcttgacccctctcgcggacaggacggtttcttcatcggcgagcccagccacatcaattccgccgattccggcttcggcaccagcttcgtcagcatgtccgacccggaaatgcaccatgtgctgacctcccttggccatgtggacgcggtactgccggtgctgcacggcccctatggcgaggatggtacggttcaaggcctgctggaaatgatgggtgtgccgtacgtggggtgcggagtgtttgcttccgccgcctgcatggataagcattacaccaaggtggtactggatgccgccggcattcccaccgcgcccggtgtgacggtcgatgcgcgcaacttcaccgccgccgatgtgcttgccgagatcgaggacgccggtcttgcctatccgctgtttgtcaagccttcgcgcgcaggctccagcttcggtgtgaccaaggtcgagaaagccgatgaccgcgagacccagcaggatcgtctggccgccgccatcgccaccgccggcgagcacgactggaaggtgctcgtcgaacaggggattgatggccgcgaaatcgaatgtgccgtgctgtgcccgaaggccggtgacgagcctgaggccagctggcccggcgaaatcgtgctcgatcatcagaacgacgaccagttctacgatttcgattccaagtacatggatgcctccgccagccacgtggaagtgcctgccaatctgccggtcagcgtgcttgaggacgtgcgtgacgtggcccgtcgcgcgttcaaggccgtggatggtgccggcttgagccgtgtggacaccttcgtgacgcctgatggcacggtgatggtcaacgaaatcaacaccatgcccggcttcacgccgatttccatgtatcccaaggcttgggatgccaccggagtgagctacaccgaactcatcacgcgattgattgagggcgtgctgaggtaagtgtggtgcggaatcggccgcaggccggttccgctattgacacatcgcccatacctgtcagtaattcatgccaagttttcctaagttcaacaggcgtacaacaaatggcgaacgcaattcacttgcgcgccagtgtcaggacagattaggcgcatagtttcttttcttggattcacgggccgcgcgaatgccgcgcataccaagcccgactccccagactgtcgtctggatgatgttgagaaaaggaacattatgaacaacctgcgtaagatcgcggccggctccctcgccgccgtgctcgcgttctcgatggccgcctgcggctcgagcaacgcctcctccgatggcaccggcgaaagcaccggcaaggccgtcaccgtgaacgaaaagtccgccaaagccacctccctcgccgacttcggcaccatggaagacctcgagaaggccgccaaggaagagggcgcgctgaacgtcatcgcccttccgcacgattggtccaactacggcgaggtcatcgagagcttcaagaagaagtacccggagatcaaggtcaccgagctcaacccgaacgcctcatccaaggaagagctcgacgccgccaagaccaacaagggcaccgacgccgcccccgacgtcttcgatgtcggccaggccgtcgccgccacctccaccgactacttcgccccgtacaaggtgcaggcctgggacaagatcccggacaccgccaaggacgccgacggcgcctactacgccgactacaccggcatcatgtccgtgggctggaacgccgacaagtacggcgacatcagctccctggacgacctgctcgacccgaagttcgccggcaccgtggccctcaacggcaagcccgccgaggctggcgccgccttcaacggctacctgatggccaaccagctcgccggtggcgacatcaacaacctgcagcccggccttgactacttcaagaagctcaaggaggccggcaacctgaccaccgtcgacgtgaccaacggcaccatcgactccggccagaccggcgtggtcttcgactggacctacaaccaggcctcctacaagaaggagctcaaggacaagggcgtgaactggaagtacaagaccttcccgaaggcccaggtcgtcagctactacaaccaggccatcaacaaggacgcgccgcacccggccgccgcccgcctgtgggaggagtacctgtacaccgccgacgcccagaacctgtggttcaagggcggcgccaacccggtgctgctcgattccatgaaggaagacggcaccgtcgaccaggccactctgaaggacgccatcaccatcgaaggcgagccggtctcctacaccaacgacgactccacccgcatcaccgagtggctccagaacaactgggacaagacgatcggcaactgaggcacagaccgatgaccgccgcaatcgcacccattgcatcgaacggacctgctgccgccaaggctgcgggtccgtccgctactcccgcttctcctctctcctcggcgatggccaagcaccgccaggagctgggcacgctcgccaccacgctcccgttcttcgcctacaccgcctgcttcctgctcgcacccaccgtcatcgtgattgtcggtgcattccaggatcgcagcggcaacttcacgctcgcgaacttcaataagatgttcgaggccaacaccatcgccgcattcggcacctcgattctggtgtctttagcatcctctctgatcggcgcagtggtgggcgcgctcgcttcctacgcactggtcattggtgccaagccgaacggcctgctgcgtcgtatggtctccgccatctcctccgtgcttgctcagttcggcggcgtgatgctcgcgttcgcgttcatcgccaccatcggcatcaacggtatcggcaccatgcttatcaagacactggccggctacaccgtgaacccgaactggctcagttcgttgccgggcctggggaccatctactgctacttccagattccgctgatgatcatcatcttcctgcccgcggtcgattcgatccgtccacagtggcgcgaggcatgcgaatccctcggtggcaacacgttccagtactggacgcgcgtggcctgcccgattctggcaccccgcttcatctccgcgttcctgctgctgttcacctccgcgttctccgcatacgcgaccgccgcggccctgttctcccagcgttcgattctggtgccgcttatgatccaaggtgccatgcgcaacgaactggaccccaaccagcagggctttgcccaggtgctggcattcgcaatgatcatcgtcgtggccatcgtcatgctgttgagccacgccgtggaaaagagggccggacgttggcaatgaccgaaacttccgcaaccaagccgccgcagctgcgcgccgctcgtgcgcgtaaacagagcatcatcaaattcgtgatcctgttcgtcaccctggcgttcctgttcgtgccgctgctggccatgctcatcttcaccctgcgtcacccgctgtccggccgctggtcggccgcgccgtggatcgcgattttcaccggcaacggcgagtcgctgggtgccgacctgaccgtgctgtggcagggcatcggcacctcgctggccctgagcgcggtcaccgtggtgatcatgctggtgctgctggtgcccaccatggtcatcgtgcatattcgctccaaggttttggagcgcgcgatcgaatgggtggccacgctgccgctgaccatcccggccatcgtgctggtggtgggtttgggcccgatctaccgctggctgtccgccgacgtgctgagcaccaacccaatctggctgtgctttgcctacgtgattctcgtgatgccgttcgccttccgcgcgatcgccgtggggcttaactccatcgacgtcaagacgctggtcgaggcatcccgctcgctcggtgcctcctggcccaaggtgttcttcaaggtgatcatcccgaacctatggcagtcgattctctcggcatcctttatctccatcgccgtggtgctgggcgaatacaccgtcgcctcgctgctcggccgtatgaacctgcaggtcgcgctctaccagctcggccagtccaattctcaaatctccaccgccatgtcgctgctggctctgctcttcggtgcggtgctcctcgttgcgctcgacctgatctccgacgcaatgcgcaagtcaagggaaggtaagtaacctgatgaacagcaattcgattttcacccgtcgccatgccggtgccgatgccgcggcttctgtttcggcacccgccaccacgtccgctgccgccgaggacgccttcaagaacgatcccaccgccaccctcgaaggcgtgcgcggcaaggacgtgaccaaggccgccaaggccctgctcaaagacagcgtcaagcgcggcggcggctccatccagatgcgcgacgtcgtcaagatctaccccggctccaccgttcacgcgctcgacgacttcaacctggacatcaagcccggcgaaatggtcgtgctgctcggcggctccggctgcggcaagtccaccgcgctgcgctcgctcgccggcctcgaagacatccagggcggccgcatcatggtcggcggccaagacgtcaccggcgtgccggtcaacaagcgcgagatggccatggtgttccaggcctactcgcttttcccgcacatgaccgccctggagaacgtggaattcggcctcgaagtgcgcggcatgggcaaggcagaacgccgcaagatcgccatggaacagctggagctcgtgggacttgccgatcaggccaagaagtacacgcagcagatgtccggcggccagcaacagcgcgtggccctggcccgcgcgctggccgtcaagccgcgcgtgctactgctcgacgagccgctctccgccctcgacgccaaggtgcgcgtccagctgcgcgaccagattcgccgcatccaactcaccaccggcaccaccaccgtcttcgtgacccacgatcaggaagaggcgctggccgtggccgaccgcatcggtgtgatgaacaagggcaagatcgagcagatcgccgccccgcagaacctgtaccagcgccccgccaccgagtacgtggccacgttcattggactcaccaaccgcctgcccggcgcatccaatggcgacgaggccgtggtcttcggccagcgcgtgccgctgctcgccggctccgccaagggcgattccgtggccgtgctcgtgcgcccggagaacctgacgctggccttggccggcagcagcgattcgcacgtcggcgaacgcgcccgcgtggaggtcattcacttccttggctccttggtgcgcgtggatacggtcatcacctccggcgaataccagcgctggaacaagggcgaacagctcaaggccaccgtgcagctgcccgccagcgagctgccggccggtctggcggtgggcgatgacgtgattgtcaccccgcgtccggtcgccgcgctcgcctgctgaatggcgttgcgatgatcgtgcggttctgttctgtttttgtgactgtacgatcgtcgaatggcttatcggcaatgatgtgtgtgggacggcggcgatttttgggcgattatcgcgtgccgtcccacagcaatcttgcagagtaggggactttctcggcattgggaatgattgacgttgatcattccttgcccattgatgatttcctcccccattcccaatgcaatcgaaacgccgtgccgtattcttgaagagtattgcacgtgtgatcggtccgtttgcggccagtaactatgggggataagtatgagcgaaccaatgccgccggcgcagcagccgcaggcacctcagcaatcgcagcagccgcaacaatctccacgcgattggtggttcacggcccatcgccggttttcgacaatcggctcggcgctcgccattatgatggtgttctggatcggactgaatattctggccactgaagcactacgaacgctgcttggcaccgatgtgcccgcttgggctgtgctgctcgcctcctccggaccgctgtatgtggtggccatgccgctgagtatgttggccttcactcgcgtaccggttattcgcacccggcagtaccccatgaaggcgggggagttcattcagattttcgtcatgtgcattccggtaatgttcttgggcaatatgattggcaatatattgtctgccggagccactgatggtcaggccaccaatcgcatcaacgacgtgattcttggcagcgactggcgggtgaacgcattgttcataggcctgttggcaccggtttgcgaagaatggatttttcgcaaggagattatctcccgcctgcgccggtacggagagaagaccgcaatcatattctccgcattggcattcgcgctattccatatgaacgtgttccagttcttctacgcctttggcctaggactgatgttcggatatgtatacacgcgcacctcccgactgcggtattcggtggctatgcacatgctgatcaacctgaacgggtcagtactcgccccattggtgatacaacagatcgatccccgcatcctcgacggcacggtcagcgaggccgaaatcatgcgtatggctgaagccggcaacatgggcgacatgggcatcatgatgttgtacggcacagtgatgttgggcctctgcattgccggtatcgtactgcttatcaccaagcgcaagagctgggagttctatcttgcgccagaggagttgcctgcggggcttaaaatacgcaccgcctatgccaatcccggcgttatcgcgtacctactgttgactgtgatgcttaccggttggatgctgttcgcatgactgtcatagccggacccagagaggcgagccgggagatatcacagattgcctgacgagccgccatcttcaacaaggtattcggtgcccgaaccggcgatggctcgcgccgccatatctttgatggtggaaggcagcacaccctcgcgcgcgaacacaagcacttggccggtcatgccgtaaggggagaagccggtgaacttgaccaatggcggctgaccctccagcgccacgtcggcggtggctttggttacgcggtcgagaatatcctgactgatcgcagacgggtcgccggaggccttggccgtgaactcaagcgtggccatgccttcgctgaccggcgtgagcttggtcagggcggccgtattgagtaccgaattggggatgaccatcatgtctccggaacgggtgcgcaccacggtctgacgccaggtgatgtcgtgcacggtgcctgtgacgccttgaatggtcaccagatcgccgggttggattacgcggcccagcatcaggccgaagccgccgatgatgttggcgattgtatccttcagacccagcgagatcgccacacctccaacaccaagggcggtgataagtgtggtcggattgatgccgaatacgggctgcagtaccatcgctgcgccggtgacccagatggtcacgcgcgtgaggttcacgaaaatcgaggcgctgggaatctgagaattgtccagaatcttgcgcaacacgcggctgatgatgcggtcggccacaaatacgatggccaatacaatggtcagccagatgagtttgccggcgttcacctgaaaccagcgtgcgatgtcttctgcatattcagtcatacgcctactgtatcggtcgtttctggtgaagtcgtggagacggggtggcagaaagcggaatcggcctacggtcgattccgctactcctggcgttcgcggcaggtctggccgaggccgcgggccagtcgaatcggatcgagaatctcgtccaactgctcggcgggcaggtcggtgcgttcgccggccacctcgcgcacggtacggccggtatgtacggcttcggcggcgatgtcggccgcgtgctcgtagccgatgtagtggttgagcgcggcggaaatcgacggtgaggactgggcgtatgaacgccccaggtcagcattgatttcgatgccttccacgcagttgacgcggaacgtctccatggcgtgcgtcagcaacgccatgccggtcagcagctcatgcaccatcaccgggtcgaaggcgttcagctgcaactgtccctcggccacagcccagttcacagtcacgtccatgccgaaaatcgtgaagcagcactggttgacgcattcggggatcacagggttcactttggccggcatgatcgacgatccggcctggcgagccggcacgttgagatcgttgaaaccgcagcgcggcccggaattgagcagtcgcaaatcgtcggcggccttcttcaggtgcacggcgaggctcttgatggcagccgacgtggccacgtacgcgcccatatccgtcatggcggccaccggatcgggcgcggcggtgaccggcagcccggtgatttgcgccagatgcttgatagcggacttgcggaatcgcagatccgcgcaaatgccggtaccgatggcggtggcaccgaggttgagctgggccagcagcggcaccacgcgatcgaatgcagccaaatcagacttcaacagcgtggcaaacgcatgaaattcctgaccataggtcattggtacggcgtcctgcagctgcgtgcggccaatcgtcacgtcattgatatgtttgtcggccagatcgtggaaggccttggcgagtttcttggtggactcggcgagcggcccgatcgcgtcgataagcgcgagtttgcaggcggccgggtaggtgtcgttcgtggactgcgacttgttgacgtcgtcgttcggatggatgtatgtgtaatcgccgcgctggcggccggcgatttccaacgcacggttggcgatcacctcgttcatgttcatgttcgacgaggtgccggcaccgccctgcatcacatcgaccgggaactgatcggccagtttgccggcctcaatttctaggcaggcggcgcgaatggcctcggccttggctgggtcgatcaggcctaattcctcattggcgatggcgcaggcgcgcttgaccgtggcataggcgcgaatcagctcgggatgttggctatcggtgatgccggagaccgggaagttgccgatagcgcgctgggtgtgaataccccagtagacgttcgccggcacctccatctggccgatgcagtcatgttccagacgggtcttgttcgatgtttcgctcatgcttccatcttcctgtgcgtgggttggaaacgccagcatgagaggctgattgcgccttgtgagaaacctcacgcgaggttcgtgcggcggaaacaatccagactcgctggttttcggtcaagcggtgtacccggggaatcctgcggggccgttcgacgatgagatggtggatggcgcggcatgcgtggcggcgaccggcatgccgggggcggtcgaatcctgcgcattgtgcacgaagatgcgattccagtaattaagcatgtccttttggctcatggccaggtatatgcccatggccagcacggccacatcttctttaagcaggtctttgatttcgatggtgtcgctcaattcgggccaacgttgcagcacggcgagcatgccgcccacggtgaactcgaccatgagatcggttttcaggtcaaggttcttggggtcgcgttgcaatgtgctgagcatttgcagacggcagaagtcgcgcagcgattcggtcagttcaagcgtgctgtgcgggcctgccaacagggccaggtggtcgaggcgctgacgctgctctggatcggagagcgtggcggtgacgcggtctcgccattgttcctcgggattgccgttcggatcgggggtgcggttgatcggaatcgattcgacctgatgcaggatggctgaatcggccaattcgggcaggctggagaagtgatagtagaacgaattacggttcacgccagcctcacgcaccacgtcggtaacggtgatcttgcgatagtcgcggtcggcgagcaattcccagaaagcgttctcgaggcgttctttggcgggcagcacctcggaatcatggcgtggacgtggcatctcttcctcctgatgcaccagcgtgatatggtcacgctgtctaataacttattgggcagtataactattatttgtggacatgtctatgagctaatcggcgatttcagttgcgtcctccgctgatggcgaagctgtggtgccggcatcggcatcagtatcggctctggccggagctgcgctatctgctcctgctgcagtttctgctgggatctcggctgttgctttggaggtcgcagaacttggtgcggaagccggggcgggcgtcggcttgcgtttggccgtggacgccttgaacagtatcgccagggcctcaaccaaatgacgccggtctgcgggggtcagcccaacgtacgcgccaagcatcgccggaatcgaagcggggaagttgctcatcacctcgctgaagctggtggcgccgttggcgtgcagcacggtgaacagcgcatccaccgcacgctcgcgctgttcgggcgtaagcgtggcgatccaatggttcagctcctcgttaaacaactgcgagctggaactcaaatccggctcggtgatgaactggtcaccatccaatagccaggtgaaggcggaatgctgcatgatgccatccgaatcggaagagaccacgcggcaaggctccggggtctcgaaaatcatgcccacaatcgacgaactcggcacgattttcgtcaccttcggctggatggtgcggtaggcggggctggtcacaatctccggcgggaaaccggggccatccagtgaatagacatgctgaatgcgcttgcgcaccttgggatcggcgttcatggccgcgtaaatcgccagattgcctcccttggaatggccgaccagaataatcggaccctcccacagtcgcgccaccatatccagataggcgctggctgaacgttgcgccggcaccggatactggaaagccatattgaaatcttccttccatccgatgagcgaatcatcggtgccgcggaaggaaataaccaacgtgcctttgtaggtcggctttcggcgcttgtggccgtcgggcagttggaaggtggcggcggcgaattgggtttgctcaccctgattgatgtgctcgaccaccgcgcccaggcgaacgttggcgtagcgggggttttcgcctgcggcctggaacaggtcgtgggtcaggtccgggttgaccactgaaaccatttgggcttcgtgcggcttgtcgtcggcatgtgtttccggcgaacgatgcagctcgcggttggcctcgtcaaggcttaccgattcaagctcgggatgccagatacccttcagccagatcagtggatgcttgagttcgaaagcgcgaatgcgtgcggcgaacgagcctgaccgcgtctcatccagcatcaacgtcggacagacactggccacatcctcatagatgagcgtggagatgatcaaggcgtcgatttcgttgaacggcaagtcggcgaaggagcgcgtttcggtgtgcgcgtaatcgataatgccggtcatgcgcacctcctgcttccgttgatattgcatatccccttgggctgcgtggtcttgcgatcgcgtgcggccgtgcggctgcgcgcagcaattaaccatatgcattccattgtagggattgtacggttttggccggcgcgatcgagcaagactgcaccgacggcgaacaattcgtggaaggattcccgtcggcttgtcgaaaattgtcgggtagcagggttgcgatgccagccagccgaccaccctccggcgctacgcgccatctcccgccggcgggagggttaaccactcaatcctttttgacgaggcggaccgctgggcccgtcaaaggttcggcagatcgaagcgcgccagatccacgccctcgagttcaagcaactcggccttgatgtcgagtcggccgccgtagccgccaaacgcgcggcccgagccgactacgcggtggcagggcacgatgatggtaaccggattgcgcttcactgcgcctccgaccgcctgcgcggccatgcggccgccgccgcgtcgttcggccaattcggcggcgagttcgccgtaacttaccgtcatgccataggggatttcggccaccagattccacacttcatgttggaatggcgtgccggcgggatgcaaaggcggcacctgatccgagccggggcgttcgccggcgaaataggcggtcagccattcgcgggttatacggaatacgtcgggttcactatcggattcgcgattcgaatcgagaacggcttggtgatcggtggcccaccaccagtcttcaagacagagttcggtaagtccctcgccgtcggaggccatcatcatccggccgatggacgtttcgactgtggcccgcatcagttgtcgttgcgtcataccgccattatcgcgcgttgagggatgaagcccataccgtgcctgatttcatgaaggacgggtcgtgctgtacggtcagtattgcgtgctgggcagcgatatctgacatagtgggggttcttgggccggcatgagtgttctttccgacatcccaaccgtctaactccgtttcgaggggctgatttgggctgttccggaggtctatctccgtttcgaggggctcctcatccgggaaaccacaagtataaacggctccgggctaacgtcattacgccgtttttggcccgtgtctactcagccaccagccccttgaaacgggagtagacctccggagaaggccaaatcagccccttgaaacgcagcgacccctctgattggagtcaatcagaggggttcggcacattgctgatgcagctggtccgccgtccgccttgaggcggaacgtaaccaagattcaggcgggattactccgcaacgagcgccaggaaggcggcggccacggcggctgtcgggttcgggaattcctcgtcctggttgaagaacggcacgtcggcgtagttcaggaacttcacttcggcacggtcgccgatcaaggccttggcctcttcggccagctgatcggttatcgtcatgcgttcctgatttccacggccatggccgtgcaatgtgcccatcgcttggttctacccgctgtttatgctggccatgcccatcgcttggctgctgtatacggtcaccgcgagttatgtgcacggcggcacccgataatcgttggaaaaccggtgggacacgcgggggcttggctttttcctgagattggcgtatctttgtcacctgttgcccgtgaaggtaacacatgcggacatagcttagttggtaaagcgcaaccttgccaaggttgagaccgcgggttcgagtcccgttgtccgctctcggatggctggttcaggatgattgattcagcctgaggatgacccgggcggttggcgcagtggtagcgcacttccctgacacggaaggggtcacaagttcgaatcttgtatcgcccactcgatgaatcgccggcagaatgttgccggttttttcatcacaagctcgggcgattggcgcagcggctagcgcacttcgttcacaccgaaggggtcgtaggttcgattcctacatcgcccacccgatatcacgctcgtcagtctatgatggcgggcattttctatatctgccgtgccacggttccttatatggcgtccggcctcgggtggcatttggctgtgagcggtttccgattatgagtggcgtccggccgtcgtgcaatcccgctgcgcgcggtgccgtttggggttataggccaaaatgtgtgtccggcggtctagtcgttcgactgccattcgacccgtgtgcggaactcgttccagtcgatgccggtgccgtatcttgcggggatgccgaacgtctcgtactggccttgcgggctcctttcccatgcctgccggtagaggcgctcgagtcgttcatcgggcatcgcgttggccgcgagccatgcgtcggtctcgggatgcgccgtgtgctgatggcaccaccagcagatcgccttcagccgtctgaccagccgcagtccacggtggcggcgcagcatgtcgcgcaggcgcgcgttccatgattcgatgagattgttcgtggacggcaccgggccgacggacgcgagcccctcgtcgaggaacgtgaacagctgaccctcccggatgcgtctgcggatcatgcgccgcgccttgacgagcctttggtgcatgtcgttcacactgccgtcggcgtattcgctcttctcgtcgaggaacgaggcgaagtcctgctcccaccggttgtaggagaccagccattcggccgcgccgcccgcgtccccgacgcggggcagggacagggccacccggcgcagctgcctgccggcctccagacggggccgcctgccggtcagttcgaggatgttggcctgcacgtggaacaggcaccgttggatccgcgtatccggccacgtggccttcgcggccttgaggacgccgcccccgccgtcgcatacgagcacgtcgggcggcgcgatgcgtgccatcaggcactgccatgccgccgctttctcgcttttggcgacatgccagccgatcacgtgcccgccggccaccgcgatcaggaccaccgcgtcgcggtgcaggtggatgccgtccacatgcaccacatgatgcacctcgtccaccagcggcacgggcggccacaggccccacatgagctcgcaccggcggcgcagcgtgcgtgccggcagccggtgctcggcctgcgactgcttcgagaacagccagtccagaccgcaccgcagatcacgggcgctgttgtcgcgcgactgggtgcgtgagctcccgcagccggcgttccggcaccgccacctgatccgtcccgagctcgtccttccgttccgcttcatcggctcgccgcacacggcgcaacaaggtgtgttcatccacccaatctgccacgccaactcgaaagtcactcaaccgttgtgccgcaaggcctgaccggccattccggacacacattctggccgacctcgagttccccgcccatacaactcgaacaggagaaacgcccactgccacaaaggaacacaagccaaaacggacacacattttggcctataacccgccgtttgggctgtaatacgggtgctttgaaccggccataacttcttcatatgtcccggggcttgtgtcgtgtgccgcggcgcgcttccatagtggatatggcggtgcggaaggggagccgccatacttacttacacaaggacgtcttggtccgccagggcaacgcgcatggaaaggggtttgcgatggtgtgcaccacgctgaatttcgcggagaaatacctgctgaaaaccgaagtcaggtccgttgccggtatgtccggcggtacttccgatgctggtactgatttcgatgtcgatctcggtggcgagggcgacctcggaagcgatcatgccaccggtttcaatcgctcgctatcggccgacgattattgggctgcagccggatatgccgatgagtcattgtattgatggacgtgatgacgcggtaagggcgcgtcgataagtgcggctggtgtcgcggctgatgccgcatttggtgctcgttcggtggtcgcggctgatgttccgtacggaccgcctgcaatggttttgcatcggtggtgcgtcaaaatccggaccgtcgccgacgctgttgacgtctggcggcgttggagggacagataatggattgtcaacgccgctgagaacgattggcgacggtggtgggacagcggatgccccaccaccgtcgccaagagtggtacttgtgtcggtggcgtccaagacatggcccggcaccgacatcagatactctgaacgtcggcggattcccgttctgtgtcccagcgccgacgtttgattcctgcttatgcgagctggcgtcggtaaaaaggcagaacttggttcaccggcgatgtctcagcacgtttgcgcgcgtcggattcttctggagcagcaggaaaacgagcgccacaacgagcaggacggcgatggagagcacgccgaacgaggcgttgccggtcagggacgtggtggtggctaccaggaaggtgccgatgattgaggccgttttagggaagaaacaatagtgagaccggggaacccttgaaatcattggggaatcatggtggcgatgcatgcgattaacacatgttgttaacacagatgtggaatgaggaggcgcgtgaggctcgtggtctgcgacgcatgagtgtgaccgtgagctccccagctgatgagcgcaaaggcagagattggtttcacgcgggacttgtctgccgaagagcggcgattgatgcagggtctgtgcgatgctctgcagcagttgctgaacaagcagtaccagcggcacatgtgggactgttcgatagcctgaaaaattttgccgcagacaatctaggcaatgtgcttggcggggatttcaatctcggttcgattggtgatttgccggcggtaatcggtgagcatttcaatgccgatcagttgggtgaaatcaacaggtcgttggcgaccatttgaacgccgactgacttgacgagctgcaggcgctggcggaggaaaacatctccgccgaccagatcagtcaggtcgctggcgcaattcaggagcagggtgccaatctggacctcggatccattgccgaacaagcaggactgcccgctgacatcatcagccagatttccggactattgggcaagtagtcgccttaagctttaacgctgacggtgttgtctcggctattgcgtgttttgcggtcgctcagcaaatcatatgggtcgtaggtaaccgattgcgagcgctgctgtacacagatgtgtacgtgggtcgaagcggattcgtggtggcaggtgagacaagctgccctcgcatggctggaaaagcttcggtctcgtggagtgcgatgttaaagctgctcaggtcaacggaatggcgggattccgccgatgcaacttgtggttgcgctcgaataaccggcgattgcaacccaaagatggtggcgggtgacatggacggcatgccatagtgagcccatcggccgaacatgacatgataaagattacgtatgaagggacattccaatgagttttcgcgctaacctgcagtacctacgtgcgcaacgcaacctgacccaggaacgattggccatgttgcttggcgtctcgcgtcaggccatttcgaaatgggaatccgaaaaggcctatcccgagatggacaagctgcttatgatctgcgacctgttcggctgcacgcttgatgatctggtacttggcgatgtgagtcggcctgccgcgtcggcttctgcggccggttcgtcgaatgttgactcctcggctgaggcggcatcgcctttagccgcttcttccaaaacggcgggcataatcgctcctatcgcggagcttgcgcaggatatcactggctacgatgaacatcgccgccgattcgcgctgctgattgccggcggtgtcgcggcgattgtcgccggggttggcatcggcaacctgttcgattccagcaattccattctcggagcgacgccgctcaacgattttctgacgtttctgtgcatctgcgtgggtgtgattgcggggctggcgatgctgattccaggaggtctgtcgcgtactgacttcaaacggcgtcacccatacgtagaagatttctacaccggggaggaccgcagccgagaattgcggctgctggtaatcggcatcgtcggtggcctcgcggccattctgatcggcattgcggtgacggtgtatgccgatgacatgctcggcgtctccgatgggtggcccaacgcgatttttctgctgctctgtgcgcccggtgttttcgggtttgtctactgcggcatgagatacagtctgctcaatatcaacgcatacaacaaagcggccgaggacgaccgcaaggagcatgcgggtgagcaggatgtctacgtcaaactgaccggtgcggtgtgtggcatcatcatgttgatagccacggtgatcggcctgtgcctgctgtttttgaaccctgcggcattgcgcggcgattggtcggccgttgggtcaagcgccgcggatggggcgatgttctggctgccgtggccgattggcggtgtgctgtgcggcgttgcggccctcgccattcagctggtcaaggattatcgcgagcgcaagtgatcaagcggtgatggtccatcgttattagggcccgttgcaggggttgcgagatatcgcccgcggcgcagaggtgccgaggactggcaaatctttgccacaatgtcaagtgatgaattcaaaaaataaaaaaatcgcccgaacggtcaaaaaccattcgagcgaaatacgcaaagtcatcgaaattgggtagcattgagttatctgaaagattgctttgttttgtttgcaattttcaccagcgtcagcataactggcacctccgtcagtacgccgaccgttgttgcaagtgccgccgggctggtagtaccgaacagagcgacagcaaccgcaactgataactcaaagaaattagacgcaccaatcatacccgcaggggcggaaatatcgtgcggtaactttaacaacttgcaggctccataggcaataaagaaaatcaaaaatgtctgtaaaatcaacggcactgcgatcagtatgatgtgcagcgggttttctaaaatgacttcgctttgccccatgaaaatcagcaccagcgtaagcagcagaccaatcgtagtaatggaatcaaatttgtgaataaacacattttcaaaatactctgttcccttactgcgggttacaaatacacgggtcaaaataccgcctgccagtggaataaccacaaacagtattacacttaaaatcagcgtatcaaagggaacactaacattggaaacgcccaacaaaaattttacgataggcacaaaagcaatcagaatgatgaggtcattggtcgccacctgcaccaccgtataagctggatttccttttgtcaacgtactccatacaaacatcatcgccgtacaaggcgcagcccccaaaagcactgctccggcgaggtattctaccgcaaggtcaggcgtaataaatgccttgaaaatcacgaagaaaaacaagctggcaatgccatacattgtaaaaggttttataagccagttgacaatccatgtcacaaacaaccccttcggattttttcctacatttcgtacactgttgaagtccactttcagcatcatgggatatatcattacccaaatcagaatagccatcgggatagagacacgggcatattccagccgagccagtaatgcagggactactggggcaaaatgccccagcaatacgcctaccaccatacacaggaatacccatattgtcagataccgttgaaaaaaattgatccccggatcagcttcttttttcaaccataaacacctccttcaattcgtatttttaaccgtataatgtgcccctcaatttgactgattatttcccggaacgcttcatccgggcagcctgtcgggtcatttagtccccagttatcgtcaaaagctctgccaatatagggacaacccacatcacagcccatcgaaatcgcaatatccggttccgggatgctgtcaaaggttttactgtattgggactgttccatatcaatcccatacagctctttcatcaagcggacagcatcctgattgatctggggcttggtttcgcttccagcagaatagctttcaaacacatcggaagcaaaatgcttccctaatgcctctgctatctggctccggcaggaattgtggacgcatataaaagcaactctctttttctccacttttagtaccccaacttatggatcagtttttccacatcagcagctttcagcacctttcccatagacaccactttttcattgaccaccaacgcaggcatagacattacaccgtaggccataattttctccatatcagtgatatactccggttgaatagacaaccccatattgttcagtgctgcttttgtgttctccagcaaggcatggcaattcttacatccgctgcctaaaaccttaatacagcaaatactgttgcttgcctcatcgcagcagctaccgtttacagtctcggcctcatacgtttcacaagctccattgcaagcacaagcaacagtctttcctccttcctcttttcttttgccaaatccgaacagtcccataatagaatctcctttcaaattttgtatggttacaccttatccttgttaaatcaacagatgctgaaatacgttaaacagataacccacaatgacaattccaagcgtgcagattacgatgaacagtcctaacagttttgcttttaccgcttttttcagcataataatggacggcaggctaagcgtagtgacggccatcataaagctgaggattgtaccaagctgcgctccttttgcaagcagggcttccgcaacggaaatcgtgccgaaaatatccgcatacattggaacacccaccaacacggctaacacaacaccaaatggattgttgcttcccaataccgtctgaatccagctttccggaatccagttatgaatgattgcgccgataccaacgccaaccaaaatatacgggaacactttcttgaaagtctcaattacctgttcctttgcgaagatcagccgatccctcactgtcagtgcatctgattcaacatccacgctgtttgcattacggatgaaatcttccacgtagttctccatgtgcattttttcaatgactgtaccgccgattactgcaatcaccaagccaactaccacatagacgattgcaatctttgccccgaaaatgctcatcaacaataccaaacttcccagatcaaccatcggagatgaaatcaggaaagaaaaagttacgcctaaaggaagtccagcgctggtaaaaccaataaacagcggaatagaggagcaggaacagaacggcgttaccgttcccagcagagcagcgatgatatttgcccagataccatgaaaacgtcccagtatccgtttgctccgctcaggcgggaaatagctctgaatatatgagattacaaaaatcaagacacagagcagcacggtaattttaaccacatcgtaaagaaaaaactggatgctcccacccaagcgggatgttgtgtctaacccaaaaacggataaaccatttccaattaccgtgttcagccacttcattccaagcacctgatcttgaatgaaaagccacgttaatcgtaaaatctccataaggtatgtctcctttcaaattgataaattcaaaactatcgaaatgttgtccaaaagagaagccaccctttacagatggcttattttacctacagcaacttccgttttgctcatcatgaggaactaaagataattgttgctcaagcaattttttagcacgctctgcgccttcgggattgatggagtaatgaacccatttcccatctttacgcccttgtatgatgtcggcatcgcacaatattttcatgtgatgggaaagtgttgattgtgtaatatgcaaatcatcaagcaatttgcaggcgcatttttcccctgtgcggagcaattctaaaatctgtaaacggttttcgtcacaaaatgctttgaacacctttatggtctctgtgtatgcagatgccacgaatctcacctcacattcgctgttttgaacttacatcctcattatattcataaattcaaaaatgtcaatatgaattttgcgaaaaacggaaagatgaacaagctgtttttcaagccagcgtattgacacacaaaaaataacccctccctgtcaagggaagggctatcacagtactttattctgttatttccgggatttcactcccgcgtcgggtccttttgcagcagcaggaagaccagcgccgcgacgagcaggacggcgatggacagcacgccgaacgaggcgttgccggtcagggacgtggtggtggccaccaggaaggtgccgatgatcgaggcggtcttgccgaagatatcgtagaagccgtagtattcgttggcgtggtccttggggatgattttgccgtagtatgagcgggagagcgcctgaatgccgccttggaacatgccgaccagaatcgccagaatccagaactccacggccgatttcatgaagaacgcggcgaagagcacgatgcacatgtatgccacgaccgccgccgtgatcatcactttgcagccgaaccggccggccagacggccgtagagaatcgcgcaggggaaggccacgaactgcgtgacgagcagtgccaccaccagctgggtggagtcgatgccaagctcggcaccgtaggaggtactcatcgaaatcaccgtgttcacggcatcgatgtagaagaagaacgcgatcatgaacatccacaacggcttgttcttcacgatcttgccgaacgtgcccgccagttcgctgaacgtgccgcgcatggccgagcccagctggtcacgggtggcgcgatagtgcacttggcggtagctggtaagcagcgggatggtgaatgccacccaccagatggcggtgatgatgaatgaggcgcgcgtgcaagccaccgtggaccagccgaagagcgacgggccgccgaagatcagcgcgatgcagaagatgaacggcacggtggagccgatgtagccccagccgtagccgtgcgaggagaccttgtccatgcgctcgttcgaggtggtgtcgataagcatcgaatcatagaacgtcagcgagccgttaaggccgatggtcgccagaatgtagacgaccaggaacggcagccaggtcaggggcagggccattgcgcagcaggtgaccacgccggtgccgaagaagcccaggaagaacttgattttcatgccttgcacgtcggcgatggagccgagcaacggcatgagcagcgctatgaccaaggaggcaatggtttgcgcgtagccccaggcggacacgatgttgccgtccgccggcatcagtgatttggcgtagatggggatgacggcggtggacagcagcacgaatgccgagttgccgacgtcgtagatgatccacttcttctcgcgggcggtcagtctggcgctttgcggcaccggttcgtggacatttgtgggatcagtcatatgcactcctcgacagtattcaactcaatctatcgtagaagcgcggactagggtagaaaaccgccaaagttgaacggcgggtgaatagtgccgggcccctttctaaggggagccagggcagaaaaatagctcccctcgctgaggggagctggccgcgaagcggactgaagggagccgggactgaagggagccgatcgtggattcccccagatgaggaaatccactcaatcgtccggaaactattcgccgatcagcgcgatggcctcgtcgtaatcggggcattgcggcacgccgttgaggctgtgctggatggcgatggatgccgccgcgttggcgatctttaccgattcggccagactatggccctttgccagcatcgcgcacatcacgccggtgtggcaaccgcccgccgaacgggtgtgtacggccttggtcgggtatccctcgatatgaatcgtctcgccacctggctcacgaatccaagcgccgcgggcgccgacacgcaccaccagcggcgcgcgcagtgtagcgcccaagccgtcgcacaactggtgcatgaagtcgtcgagtccaccgccgatggtgaccttgctgtcgtcgatcggcgcgcccaggcgctcggccagcgtcatggcctcctgacggttgcaggaccagaccgggcgtgcgagcaccaggtcctcaagcatatggtcgttgaccagacgcaacgtattggtgggattgatcaccagcgtgtagtcgcgtgcagccgggtcggtaccggccttgagcaggaatccgtccacgccggtggccgtgtggtccatcagtgtgttgccgctgatgtgcaccacgtctttgggctgcggctccagcgtgtcgaacgtgtccgagtcgccatgagcctcggcgccataggaagcgatgaatgtcttcttcggcgcgccggagctcagcaccacgcggaagccggaatcctcatcaagacgatcctggccgatatgcgtaatgccgttgtcttggaatgactggcggatgaaatgcgcccacaggccgttgcccagaatgccggcgtgctcggtcggcacgcccatgcggctggccgcctgcagcacgcgatagctgccgccaatggagggcttcggatgatcggccacggcgaatccgccctgtgccggcaccttgtccacattgagcataatgtccacccagacttgccccagtgaaatcacgctgggctcgtgagtgccgatacctcgcttgagattcaacatgacagcctccttcgtcgtggccgtcgcaagttgcacgaggaccccttcgtcccttgccgtctcttataccgagattatatgagagtttgctggatgcggaaaaggaaggccggcgtgttttatcgggtaaacgctatgatttgcagcgtaattcgccgctggcgaactgctgacgaactacttgcggaccgctggcgaaccaatgccgagccgctcgcgaaccgctgatgccccactcgcaagatgcgctcgaaccgctcacaaaccgccgaagttcgcccatgatacacgcaagagttgcggttgtcggtattgggctatatatttgtgaagttgtgtgttcggcatgtcgggtgaaaccggcggtcgaatgcgtgaaagacttgacacatcaaggttaagggagtccatcatggcagctcgttgcgcagtgtgcggcaagggaccgcagaccggtttcaccgtttcccattcgcaccgtcgtaccaagcgtagcttccgcccgaacctgcagtctgtacgcaccacgattgatggcgagaacactcgtctgcgcgtgtgcgtcaagtgcctcaaggccggcaaggttcagcgcgtggccgcgtgaatcgcgtactaacgtggagcaaaacccgtttgagcttcggctcagcgggttttgttgtttctgcggcctaaagaggccgtgcgaatagaataggccaatatgagcatcactatggacaccactctcgcttcgctggtcaccaacaagcgtcgcgtgtccgcgctcaaatcgctgggaatcgtcactgtcggcgacgccctgacctactatcccttccgcgtcaccgaaccggtgccgcttcgcgccatccgcgaggccacacccggccagcagatggcatttgccgccgtgatacgagacatgcgcgtggtgccgatgaacgctcgccgcggctaccgactcgaggcgacggttgacgacgccgactttgcccgttcgcgtcgcgtacccggcagcacggtccggctcacgttcttttcgtatcgtaaatcgtatgtggattgggtcagcatgcggctgcgcgccggcacgtctgtggtggtctccggtatgcccggcgaatacatgggtcagctgcaattcactcatcccgaaatcctcactgtcgcgcccgtgccggccggagcaggagcggggcttgagggttacgctcggggcgcggcatccggcaatggtgcgtttgcgggaagtgccgatccgtatgccagtgtgcagtccgcgtatccgccggccgcgactgcctcttccggggccgcgtcgaaatacgacgccgataccgtgcaagaggcgcttacccgcgtctgccggccccgcccggtatatcacgccagttcgcgtatttcatccgaacatattcatgagacgattctgggattgctgtggatgatgggggcccgcacgtcatccacgcctgacgggcaactcgctggcgctgggtcagccggcattgtggctcccacgactgacaccatcgccgtccaaaacggggaagagaagtccggcacgaccgccgaatccggtgctgaggcgctctcccaatccatcccagatgtgctgcccgaatcggtgcgcaaggccaagaacctcatgcatcgggctgaggcgttcctggccattcatgatccggcctccacggcccggttcaaggaggccatcgaaaccttgcgctatgaggaggctttcgtttcgcagacctcgctgctgaaggctcgacagcacgcgcacaagtcatcggcgcatccttgcccgctgaacgaggcgctggaaacagctcgagcgtcggtgggcgaagcggccgcggagccaagtacgcaaccagaagcatcggagcgcggtgctgcgaccgatctgcctgatctgcccaatttgcccaatttgcccaatttgcgcgaccgcttcatcgcatcgttgccgttcacgctgacagccgggcagagtcaggtggtggacgacatcgcgtccgaccttgaacgtgactggcccatgcaacgtctgttgcagggcgaagtcggctccggcaaaaccgtggtggcgctcgcggccatgctgcaggcggtcggtgccggctatcaggcggtgctggtggctcccactcaggtgcttgccgaacagcattacgagaccatcagcaagatggtgtcggggctgacccttgcacagccgggtgccaaggagaccgatgccgcggccgacgttgagggcgcgatgggcgcgtccggtgcttcgacggtctcttcttccaaggtgcctgcggaaattcccgtcaccctgctgaccggtggcatgaagcttgccgcccggcgtaaggcgctcgctgcggccgccagtggtgagccgggcattatcgtggccacgcacgcggcgttttccaagaccttccaagccccgcacttggccttggtggtaatcgacgagcaacaccggttcggtgtggaacagcgcgaaagtctcaacgccaaaaccgatgacggcaccacgccgcatctattggtgatgaccgccacgcccatcccgcgcaccgccgccatgacttggtttggcgatctcgatatttcctggctcaccgaattgcctggcggccgcaaaccgattcgcaccgtggtggtcaatgaggccgatgccgccaccatgggccgtatgttcgcgcacattcgcgcgcgagtcgacgcgggggagcgggcctatatcgtgtgcccgcgcattgatgcggatgatgaggagaacgaaggcggttccggcgtttcggcagcagccggttctgcccgcggacgcgccgcagcatctggttccagtgcccgcacagctgcgggcggccgtgcaacgcgcgctgcgctcgacgccatcggcatcgacgacccctacgaaaccttcgacgaaaatggcgaaaccgtggctcgcccgccattgcatgcggtggccgaaatcgccgatcggttgcagaaacttccacagttccaaggcatccgttttaccaccttgaccggtcgggacaaggatgatgtgaaaacccaggtcatggccgattttgccagcggcgagactccgattctggtgtccaccacggtgattgaggtcggtgtggatgtgaaacaggccagctgcatcgtgatctttgatgccgaccgatacggcctctctcagttgcatcagctgcgcggccgcgtgggacgtggtggcaccaactcgtgggcgttccttatttcccgtgcggaacccggctccccggccgagcaacggctcgaagtgattcaccactcgctcgacggtgccgaaatcgcccaagccgacttggaattccgtggtgctggcgatgtgttgggcgacgcccaatccggcggaaagtccagcctgaagctcctgcgcgtggtcaaggacgccgacatgatcgccgacgcccgcacccgtgccgagcagcttctggccgccgaccccgaactggcaggtgaggtccaactcgccggtgccgtcctcgacttcacccgaggcaacgaaaccttcctgacctccagctgaggcacctccagctgaggctagggctgcgcccccgtaatcgcacgatatagtttttccgtatgccgatcgtgaggaaatcacggtcgggaagccctcgaatgtgcttcagtggaggcaagaccattcgtacatgaggtgctcgaagtgcatatatcattggtgcgcttcgagcaccccattgttgttcatgattggtatgcgcagatgaacctgtacagtgaaagctatgcgtgtaatttctggacgattcaagggtgtggcgcttgctacgccgaaaacgggtacccggcctaccacggatcgcaccaaagaggcgattttctcgcacctcgactcatggggagtgctggatgatgcccgtgtactggacctgttcgccggtactggtgcgttgggcatcgaagcgctgagccgtggcgcgcgagaactcgtggccgtggaaagttcccggcctgcggcggcgctgattaccaagaccttggcgcagctacagaagaatcgttcgtgggatgcttcgctcaaggcccgtgtgctggtcaaaaaagccgagcaagtggctggcggcttcggcgaaccattcgacgtgatattcatcgacccgccctatgcctatgagaccgctgaatgcaatcagctactgtccgatctggcggcgggcagcgccaccaacgagaacacggtgatcatgctcgaacgctcggtacgctcggatgatcccactgcccccggaggctggcaaatcaccgaaagccgcaactacggcgaaaccgccgtcttctacatcgaatccgcggatgacgactcggatatagagcgttccgacgattccgccgcgtagtgaatctcccaccgtgtggtgaattaatcggcgagccggcgcggatgggcggcggagacctcccagcccaaggccatcagggtcttgcgatcggccttatccagcgccttgcaatccagtgccgcgataaggtctggccgaatctcggcggtgcgggccagcgcttcgtcgcggcgaaaacggtccaccttgccgtggtcgccggacaacagcacgtccggcaccgcaataccgcgccacacggccggcttggtgtactggcgatgttcaagcagtgcgccctcgccggtgtaggattcctcaacaatcgaatctgggttgcccatgaatccgggcatcaggcgggtgatggcctcaagcatcaccgataccgctacttcgccgccgttcagcacatagtcgccgatcgaatattcgcgtacgtcgacgccttgggcgcggtagtagtccgggatgcgcgcatcgtagccctcataccggccgcagccgaacagcagatggtcggcatggctgagctcggtggcgtcgcgctgggtgaacaacggggccgatgggttcgggaagatgagcaccggtgcgccggatggggcggaggagtcgggtgctgcagagtcgccggggtcgcttgtatcgacggcgtcggttgcggcggacggctgcgagaatcccagcagttcgtccaggcattcgctccacacttcgggcttcatcaccatgccggccccgccgccgactggcgtatcatccaccgaatgatgcacatcgtgggtccagtcgcgcaggttgtgcgccttgatctccaacaatcccttggcctgggctttgcccatcaggctgaggttcatcacctcaaagtattcggggaacacgctcacgatatcgatcttcatgtcatccagcctaacggtagcccctcccgcattacacggccaccactacactattgcggtgatgaatacgacgatgaacctccccacccgcaaaaagcccgaagtgttgtccccggccggcaacctgaggggcctgaaaaccgcggtcgattatggtgccgatgccgtctactgcggcggcaaagccttcggcatgcgatcggcccccaaaaaccttagccttgaggatttcgaggaaggatcgcgctacgcccatgaacgcggcgctcgcgtgtacgtgacctgcaacgtgctgccgcgcaacaacgagatcgaagccatgcacgagtacgtcggccagctcaaagacaccggcgtggacgcgctgatcgtctccgatattggcgtgatgatgatggcccgtcaggtggctccgaatctggaactgcacgtctccacccaggccggcgtgactaattatcaggctgcgaacgccttctacgagcttggtgctcgccgtgtggtgttggcccgcgagatggacttgcaggccgtgcgtgatattcgcgccaacattcccgatgacctcgacatcgaatgcttcgtccacggtgctatgtgcatggccttctccggccgctgcctgttctccaactatctgaccggccgcgatggcaatcacggcgaatgcgcccagccatgccgctggaagtattcgatcgtggaagagaagcgccccggccagtacttcccgatcgagcagaccgagaacggcgcctatctgttcaattcgcaggacatgaatatgctgggacacttggatgatttgattgactccggtgccaccagcctcaaaatcgaaggccgcgcgaaaagcgcctactatatcgccgccatgaccaacgcctacaaaaccgcggttaatgaatacatgattcaacgcggttttgaagacgctgatggcaatgttttgaagcctttccatgaccgtgtgattcgcccgggcgaccccgattttggccaaggaaccgaagatcaagtgatgcgcaatgctgatgccgcgttcgccggtgtggccgatgagggatatgaccgtggctctgatactgcggttgccgattcggtcaccggctcggttgccgcagaacgtgaccgcgtgacggttgctgatgccgtcgactcaactgcctctggtacgccggccggcaccgccgtcgaacccgacggcatgagctctcacgcccgttccccgcgccgcaagtccaacaccgcggtcgaacagattgagaccgattggaaacatgcggccgttcgcccggccccacacgtcgaactgcccgaatggctgctcgaggaaaccgacaaggtggcccaccgcgactactccaccggcttctattacccggagcacaaggtcacacagaacaccgaccgctccgcctacttccgctcatggctggtagtgggcgaagtgctgagctggagcgcggacgaagacggacgtgtcacgctgatgagccgtaacaagattgagcccggtcaacaggtcgaattcctgctgcctggcgagagaccattggtctttaccgtgccggaaaccggcctgcgcgatgccgatggcgcgccagtacccgccatcaataatccggcgcacgtgttctcgatgccctgcccgcaccaggtgcccatcaacgccgccatccgctcgcgcaccaaaaagcccaccctcaaagccgaataacctaccactccgcccccgctgactggggggtggtcatgaaaatcatgaacaccgcccgcacccaagaaagaatgccttatgcctgaatacagcgaagaaatcctcgattccaacagcatcagctctaccgataaagccggtcgccctattccggtgaccatccccatcgcactggcccccggcatcaaggtggtgtacaccacgcgactgggcggcctgagcaccggcgattacggcaacctgaacctcggcggcaagtccggcgacgaacctgaggccgtgctgtcgaaccgcatcgcactcgccgaagcggtgcaagcccgcctatcgctggtctcccaagtacattccggcgtggctgtggacgtggacgactcgttcgtcatcaacacccccttcggcttcgacgtgtccggcacacatggtgagactgacactccgcacgtcatcgaggcggacggccaggtcaccgcacaatccggcatcgccctaggcatgttcgcggccgactgtctgccggtgctgctgggcgacccggtcaccggtatcatcggtgcggcccactgcggccgtcgtggtctggagcgcggcgtgatcggcaccacggtggacctgatgaagagcaagggtgccgacccggcgaacatcgtggccacactcggcccgcgcatctgcggcgactgctatgaagtgggcgacgagatcgccgaccagttcatcaagcgcttcccgctgaccaagacgaagacccgtttcggcggtgccggcatcgacatcgccgaagccgcgatgatcgacctcgctttcgccggtgtacatcaggtggtcgattcgatgccgcgcgtgcacgccgccacccagtaccttgaggaagacccggaactcgccgaactgtgccgtacggatggcgaaggcccggccgagctcgcggagcgcatcgacaacatcagccacagcatgtgcacgctcgaaaacccactgtggtactcgcaccgccgcgccgcgctcgccaacaaaacacacgaaggccgcctcctcgccctcatcgtgcgtgactaaacggagaatgcgagcacattccgtggagaagatgtgatgcagttcacggacggccagccctcaccctacggtggtgcctatgactgagagagatttcgatacccccgtcgagacgcctaccgtccagccggcccccgctcagggcgccaaaccgacgcaaaccgtgccggtggtggccgtggtgctggccgccggcttcggtacgcgcttcgaccccgataatcccaagcagcttgtctccgtgggcggcaagcccatcgtgtgctggagcattgatgcctttgaacattgcgaccgcgtcagcgacatcgtggtggtggtcaatcccaaggtgcgcggtgaagtggaaacgttggttggcgagatgggctacaccaaggtccgcgtcatcattgacggcggtgacgagcgtgtggacagtaccgccaccgcgctcgacatgctggctacggctggcattccggacgatgccaagattctgatccatgacgccgtccgtccgttcgtggaacagtccgccatcgacggttcgattgatgcgctcgaccagttcacggccgcaaccgtggcctacgcctcaaccgacaccgtgctgttgaccgaggatctgggcgatttgaaagtggtcaagtcggtgccggaccgcccgaacaccttccgcgcgcagaccccgcaatccttccgcttcgcgacgattcgtcacgcttacgatttggctgccgccgacccggacttccatcccaccgacgacacgcgcgtagtggtcgattatctgcctgatgaacccgtcgccattgtctccggtgcggaaaccaacctgaagatcaccacgctggaagatattcccacagctgagcgtatcgccgaggagattctcggtcgtgatcccaaggaagaggcccgcgcccgcatgcacgccctgctggcccaagcggccggccagatgcatcgctagactggcattatgcgtgaactcaatgttgtgatctccggcttcgaccactatgacggcgtggaggtcaatcccgccgtcgaagtgcccaaggccatcgccgagcagggactgggcgtctcctctgctccggacgatccgttggagcaggtcgccgtcaccgttcatgctgtcagcatcccggtgagcttcgccaaagcctggcccacgctgaaagagacgattgaggccaccaagcccaatatcgtcatcgccaccgggctcaagcacacagcccgaggcgtgatgcttgaacgatgcgccaccaacctgatggacgcgatcaagccagacgcggacaacgtgatcccacgccgcgaacccatcgatcccaatggcccggccgcctattggacccgcctgccgttgcgctcgatcctgaatgatttcacggacgattcgattccggccaccttgagttcggacgcaggtacgttcgtatgtaattcgctgttctacaacttgctcaactggaccgccacccaggagcaggtgctgggcggattcgtcagcttccctccggtcgttccggcgcattccagccagcatggtctaccactcgaccagcagatcgccgctggccgtgatgtggtgcgcgaagccgtgcgctactatctcaagccctccagctccgacatcctcatcgcctagcacgctgtgcgccacgccggaatagaacatggttcgcacgcattgtaacgattgcgcgtcgctcaacgctcagcgctagtgcgatgcgctacagtgcttcaaggatgtgccaagagctttatgcgtgtgcgaaaggaataaacagcgatggtggatcgtttcccggtggtgctgcgaggatatgacaaggagaaggttgatgctgccttcgacgctactcaggagagtatgaagcgtgcgcagcagacgttggccagcatgcgtgagcagattgcggcggatgacgaccgtattctgcaactgcaggcccaacttcaggaagagaagaacaagaagccggaaggcaacagcttcgcttccttgggagcgaacgcccagcagatgcttgcctccgccgaacagacgagtaccgaactgctggaacgcgccaagcaggacgcgtcctccatccgtaccacggctcaggctcaggccgaaacactgatcaacaacgccaagctggatgcccagcatattgttgacgacgccaatgccaaggccgcctcgattctgacgaacgccagcaatcaagccgaatcagtgaccacctccgccaacgaggatgccgcacaactgcgctccgaaaccgccaagaccatcaccgaacagcgtcagaccgtcgagcttgagctcagcaacgcgcgcgaagagcacactaagaagatggcttccgaacgctccactcaagagcgcgaaatcgccgacatgaaggcggaggcgacccagcaggttgccgcaatgcgcaaaagcgccaatgaggagatcaccaagcttaagtctgattccaacgatcagattgaggcggcgctcgccgaggccaacaagaagctcgccgacgtgcgcgagcaagtgtccaagatgatgaccgaagcccagcgcaaggccagcgaaatcattgatgcggccaaaaccaagggtcaggaaatcactgatgaggccgaggtcaagcgcaccagcacgatgagccaggtcaacgccgaggtcgagcagatccgtcacgacatcgccgctcagcaggatgaggccacgaagaaggtcaacgaactgctgcagcacctcgaagagcgtcgtgtggcggccaagcgggaagccgatgagttggtcggtcaggccaagaacactcgcgaccaagccgattcgtatgccgcgtccaagcgcgaggaggcggacatccaggccgccgcaatcgtacataaggcgggcgaggaagccgatgcgcagatcgaggagcgtcgcgccgccgcccaaagcgagcttgacggtctgtccaagcgcatcgccgatctgcaggaacgcgagtccgtcatcacccagcgtgtttcggaactgcgttctatgttctcgcaggcgttctccggattcgctttcggcggtaatgcggcggcctctggccaggatcaggaagccgctgccgtggcggcattgccggtggttgcgcccgtcccggaagtcaagcctgtacacaacgaggccgatgaccagccgggtgagttgagcggaaacgagtcggctgccgacgatcacaatgagacagatgcggcaccggctgattcggctgattcggctgattcggctgcgcagaatgagcagtccgaatcgtctgagccgtccgagcaccagacacagggcgaaccggaggccccgactcaggagaatccggccgtatctgagcagaacggcgaatgacaggccttcgattagactactagcggtaagaattacggcacctgcgctttcgagccaggtgccgtattcgtttgaatctgcgccacaagcgcaccatcacagaaggagtatgacatgagtgaattgacgcctctgaccgacgaagcgttgaataccctgcgcggcgatttcgcacagagcggcaccaaccgtctggccatgaacgcggtgaccgccgccggcatcgacaaggtggctcgcaattatgaccgcgctcgtctgatgcagcgtcgtttctccaccatcgttgacaatggcgaagccacccatcaggatcgctccggccgctgctggctgttcagctccctgaacgtggcccgtttcgtggccaagaagaacatgaacttgaaggagttcgagttctcccagaactacgcgatgtactacgacaagctggagcgcgtcaactacttccttaaggatgtggccgctctggtggctgccggagagccttccgactcccgcctgatgcagcacctgctcgccgacgtgatgggcgatggcggccagtggaccatggccatgaacgtgtacaagaagtacggcgctgtgcccaaggacctgttcccggagaccgaatcctccaagaacaccggtgaaatgaacatccagctgcgccacatgctgcacaccgccgtggcgcacatgtacgccgctgacggcgatgcctccaaggtcgaggcgattattgccgacgccactgctgccggccaccgtattctgaccatccacctgggcgagccgccggtttccttcgactgggaatggaccgacaaggatggcgaattccaccgcgacggcgagattacgccggttgagttctggaagaagtacgtgggtccggctgatcttgaggactacgtgtgcctggtggacgatccgcgcaccgagcacgccaagggcaagaagatcggcatcgagcacctcggcaatgtggctggcggcgacgccaccgagtacctcaacgtgccaaaccagttcatgaaggactgcgtcaagcagattctcgttgagcagggcattccggtatggttcggtgccgactgccacccgttcatggaccgtgagaacggcgcttgggccaccgacctgttcgagtacggccgcgtgtacgacgtggacttcgatttggacaaggaagcccgcgtgcgcttcggcgactccgccatgaaccacgccatggctttcgccggcgttgacgtggccgacgacggcaccacccgccgctggcgcgtggagaactcttggggcgccaagatcgccgacaagggctacttcaccatgtccgacgactggttcaccgaatacgtctacgaggtagccgtcccgaagagcatgctcccagccgaataccagaaggctctagaagagcccgccaccatgcttccggcttgggatccgatgggcgcactcgcataagaaagagcccggtgggctctttcgcgagtgcgccgagccgcggcagcggcgaggtgatgttgagtctgccgtaggcagtcagtcggagagctttggcctgaaagatcagcgcgcctgaggcgacaggccgtgaagcgaacagcccggtgggctgttcgtaggcctggctcgcggtcgtaagaccgtgagggacgccgaaggtaggattgagtctcgccgtaggcgagtccgtgattgttgggctcggagagcactccgagctagcccgaaaagccgggaatgccgatccatatcgtagcgaaacactaatagacaaccggttgcacaaacgtcgaaaagatgccataatagccgtacgccatgcgctccctcaagcaggcgttccgttcaatgaagacggagactgatatacacaagggaaaaccggtaaggagtatcgattgaccgaaatcaccaagctgagtgtggaagacctgcagtcgttgcgcgattcgtttaccgcagatgagacgaaccgaattgccatgaacgcggtgaccgccgcaggcattgacaaggttgccaagaactatgatcgtgcccgtctgttgcagcgtcgtttttccacgatagtggacaatggtgaggctacccatcaggatcgttccggccgttgctggctgttcagctccctgaacgtggcccgttttgtggccaagaagaacatgaacctggagcagttcgagttctcccagaactatgcgatgtactacgacaagctggagcgagtcaactacttcctcaaggatatggcctgcttggtcgaggccggggagcctgaagattcccgtctggtgcagcatctgctgcgtgaagtcatgggtgatggtggtcagtggactatggccatgaacgtgtacaagaagtacggtgccgtgcccaaggatttgttcccggagaccgagtcctccaagaacaccgacccaatgaacaacaagttgtgcaagctgctgcgacaggccgttgcgcatatgtatgagaaccccgagaatatcgatcagatcgtgaagaatgccacggaagctggccaccgcattcttaccattcacttgggcgagccgccggtctccttcgactgggagtggaccgacaaggacgacgagttccaccgtgacggcgagatcacgccggtcgagttctggaagaagtacgtgggttccgccgatttggaaagctatgtgtgtctggtggacgatccgcgtaaggaacatccgaagggacgcaaaatagccatcgagcatttgggtaatgtggtcggtggcgacgccactgagtatctcaacgtgccgaaccagttcatgaaggactgcgtccgtcgcgtgctggtggaacagggcattccggtatggttcggtgctgagtgcggaccgatgatggatcgtgaggccggtgcttgggccactgacctgtttgagtacgatcgtgtgtacggtgtgcgctttgatttgtcgaaggagcagcgcgtgcgctttggtgactcggccatggatcacgcgatggcctttgctggtgtggatgtggctgacgacggtactactacccgtcgctggcgtgtggagaattcttggggcgccaagattgccgataagggctactttaccatgtccgatgactggttcaccgagtacgtctacgaggtcgccgttcccaaggccctgcttcctgaggaatatcagaaggctttggaagagccggcgatttccctgcctgcgtgggatccgatgggtgcgcttgcataagaaaagccgacggctcttcgcataacacaaggtccggcagattgactctgccggaccttcttggtatctcagcggaaaacttataatccgatggcgagggtgctgactccgtggatcatcagttcgacgccgatgcacaggataataaaacccataatgcgcgtaagccctaggatgccgccgggccccagtttatgtaccagtggtgtgcaccagcgcagcagcgccataatgacgatggatatcaccaatacggcgataaggatggccagccgctcacgaggttccgtataccgggccgataggccgatgacttcgccgatggcgccggggccggcgattagtggcagtgccatcggtgtaaaggcgatgtcattgtcttgatgcgcttccggatcgccatgatcagaggccggtaccagcattcgatacccagaatgcgccaccacaaaaccacctgcgatttgaatggcgggcagttccaggtggaacatgtcgagaatgaacgagccgaggatggtaaacgccgccaatatggcgaacacatacagggatgtgtaccgcgcctgacaacggagttctttcttgggcaggtcggcggtaagggtggcgaagctggccactgcgccgacagggttgatgataggaaacaaggccaataaggccattgaaaagactgcgatgtctgctctcacgttccataagcgtaatgcaaccggttgtctcagtcaacgtgagaactatatcgagtgtcgggcgcgccagtgccctatggcgatgtgaaggatagtgtttacagcgactttctccgtaccagtgtcatgtgtttgatgacggtggtggcggcctctccgtcaatcatgcgcatggcaaggtcggctgccgtggagccctcttctcgcaacggctgttgcacggtggtaagcgggggattgcaacgctcggcgattggatggtcgtcgaatccgacaacggcgatatcgtccggaactgttagcccgcgctgtcgaatcgcctcgatggcacctacggcgatacgatcggagccagccagcaatccgtcgatatcgtcatgtgtatccagcagttgcatcattgcggaaaagccggcggtcgcatcccatccggtgaacagtaccctgtcgtcgggcagttcgtcaccgcatacacgtcgatagccggtgagccgatcgggggatgccgggttggagcgcggtcccaaaatcgatatgggatgccgacgtccggcgtcatgcatggcttgggcggcgatttgggctccatacgtgtcgtcggaatagacgctggagaaaataccctcatatgagcgatcctccatctggccaagcattacgcaagggatacgcagtttgtacatttcctccagcaaatagttgttggcgtagggggaaatgtcgataaccgcgtcgaatgagcgtcgttccagatgttgttgcacgcgatgacgttcgaaatcggtggatgcctgcaataataccggtagatatgacgattcgctaagtttctccgtgatgccgctgataaacatcgcataggtcggatcgtcgaaaagctcgtcgagcggctcggtaatgaggatggcgatggtctcattgcggcccactgccagtgcgcggccctgtgcattgggaataaagcccatgctatccgcgattttcttgatgcgtgcggtggtctcgcggctaatgcgtggagaattgttcagagcgcgcgaggcggtggaacgtgagacatttgcggctttagcgacatcggccaaagtaacgcgattgcgctttgccacggtcataattctcctttgaatgcaacagtaatgcaatgctatatgaaacgattgtaacccaatgtctcgcaacacgcaggacaatcggttgcatatttttttgaaatctgttatcttcatagcaagcaatgaggcaagtcacacaaaacgtcagaccttatggctgtcgataacacagataattccatccactctttcaaaggagaaaagatgtttgggaaccacatgaagaagaccgttattgctgcatgcgcaaccgttgcatctctgagcctgctgttggcaggctgcggtaccgatagctccagtggcaaaacgcagattcgtttcgccacttgggataaggccgaagatgtggaccgtcagcagacgctggtggatcagttcaacgagtcgcatgacgatatcgaggtcacgcttgaggcctacggttccgacttcgatacaaagatcagcgccggcatgggctcaaacgatacccctgacgtcatgtacatgtggaattacccgtcctacgccgacggtctggaaccactcgatagctatatcgaaaaggaaggctccgactggaagtcggacttctactccacgttgtggaactacaactcctacgatggcaagacctatggcgtaccggtcggcttcactacgcacgccctctactacaacaaggatttgttcaagcaggccggcgtcgaagcgccgaccaatgactggacttggaccgacctgcagaaggctgccaagaagatttccagcaagaccgatgccaaaggcttctccttccagatgaagcccgatccgtatgacttcgagatgtacctgtggagcaacgacaccgcttacagcgacgagaacggcaccctcgaaggcaacatcgattccgccaaggccatcgacacctatcagatgttccaggacatggagaaggatggttccgcggtggccacagaaggcaacggcaccgatgagttccgcgccggcacgaccgccatgtacatctacggttcctgggccctcagcaccctagacgaggacggcctgaactatggtgtggtcgatatccccgcattcgccgactcagaccatgattccgtgtccatcctgagctcgtccggcatctccatcgctaagagcagcaagaacaaagatgccgcttgggaattcatcaagtactgggccaatgccgactcaaacaaggctcgaatcggcagcgagctgcccgtgctgaccagcgtggtcgagtccgagggcatcactgacaagagccagtacaagccgttctactcgatgctggaacagtccgacggctacagcccttccagcttcaaggtcaagggatggtccgagatctccgacaagcttgccctctccttcgagaagatgtacaacccctcctccctcgaagatcccgcttcggccatcaccgaagcgctgaagtgatgaccatctgggcaaaggaccattatgaaagtgctagcaaaggtcaataaacgggcctggccatacctgttcatccttccttggatcatcgggttcctagtattcacgttgggacctctcgtcttatcgttcgtcatgagcttctttgactggtcgattaccggaacccccaaattccgtggcctaggcaactacatcgagatgtttaccaccgacgatcaggtgctcaagtccctgtccatcagcctgaagtacgccgcgattttcgtgccgctcaacatgattatcgccctggttctcgcgatgctcatcagccagccggtcaagggtgcgaagtttttccgcacgattttctacatcccggctgtcatctccggcgtcgccgtatccatcatcttcggatggctgctgaacggcaattacggcgtgatcaactacctgctgtccctgctgggcatcgacggcccgcagtggctggtcgacccgaagtgggctatcatcgcggtcatcttcgccagcgcgttcggcgtcggttcgatgatgctgatcttctacacggatatcaagaacattcccattgacctgtacgaggccgccgccatcgacggtgccggcccggcgcgtcagttcttcagcattacgttgccaatgatcaccccgaccatcctgttcaatctcatcacgtcaatcatcagttcgttccagcaggtcaccctggtcatgctgctgacgaacggtggtccgatgaagtccacatatttctacggactgatgacctacaacaacgccttcaaattccacaagctcggctacgcctccgccaacgcatgggtcatgttcatcatcatcctgctgcttagcgcgctggtgttcaaatcttccgatacgtgggtgttctacgagtccacggcaaacaagaacaaggccaagaagggtaagaaggcaaagggcaaggaggtagcgcgatgaagatgtcgctccgttccaaggtcgtgatctacgccctgctcgtcatggtggcgatctacttcctctccccgttcgtctacatgctgttctccacgttcaagacatcggctgaggccatcgcctatccgccgagtctgttcccgaaggaatggcaatgggagaactatgcgaaagcatgggatgcgcagccgttcggcaagtacctgcttaactcggtgattgtcaccgtgctcaacacgctcggcactgtgctctcctgctcgctggtcgcctacggtttcgcccgctacaacttcaagggcaagaacatcctgttcatgattctgctgagcacgatgatgattccgtgggacgtcaccatgatcccgcagtacatggagttcaaggctttcggctggatcaacacattgctcccgctgattgtgccctcgttcttcggctccgcgtattacatcttcctcatgcgccagttcctgctcggcgtgcccaaggaatacgaggaggctgcgcgcatcgacggctgcaacgacctgcagatctggtggaaggtgtacatgcccatcatgcgtccctgtctgattctggtgggtgtgctcaacatgatcaccgtatggaacgactacctcggaccgctcatcttcctgcaggaccgcagcaagtacacgctggcgttgggcttggcctcgttcaagggcgtgcaccagacccagatcatcccgatgctgtgcatcaccgtggtgatgatcatcccgcccgtggttgcgttcctttccggccagaagtacatcgtcgaaggtacctcaggttccatcaagtaataccgttggcgggccaagggtggctgagccccattgctcggtcactcctgtggtcgcctgaactgtttccggggcgaatgatgcccccacgcacgaaatgtttcgggccatcggtctcggcccgggccaagtgcgcccaaaccgcaccaaggagtatgacaccatgattcgcgattcgttttccaccgcactcgggttcgagctgccaacagacggctggatggtgagcgaggacgcttatgagcctgaccgcaacctgcagtacgagagtctgttcgccctatcgaacggatatctgggcattcgtggcagccatgaggaagggaacaagcccacgttgccttacctgtacgtcaacggggtgttcgacaagtccgaaacgttcatgaaggaacttgcgacattgcccaactggcttggcatccgcctgtacgtggaaaagcagctcatcggtgtcgacgaatgcgagatcctcgaataccgtcgtgcacttgacctgaagcacgcggctttggtcaaacgggtgcgtctgcgtgacccgaaaggacgtgaaaccctgattgaaggcgtacgtttcgtcagccgtgcgcatgcacatcgtatggctgtgcgactgtgggtcacgccgctcaattactcaggtctaatcgaagtggagcagattaccgacggctccatcatcaacttctatgatgcgccccgtttcaaggtcaagcacaccgttgtcaccgccaatgagccgctcggtgagaacggggtgtatatggaggtcgccacgcgtgatgagaatctgcacgtgggtgtcggcagccatcttgaaggcacctgccgagatcgggatgtgttgggcaatcgtgtgttccatgcctttggcgagcaaggcgttgaattctgcgacttccgtgccgatgaaggcgacagcgtggtgctgaccaaatacgtggcaatgttcgatggacgtgacactccggccgacgaactgcacgccaccacctgccgtgaggtcgaggacttcgttgccgaagggttcgagcgtgaattcgaggttcatgccgatatttatcgcaagatgtgggggcaggccaacatcgatatcgagggagatcctgagcttgatcgtgcgattcggttgaacgtattccacctgatgagtaccgccaacgaacatgatgaccgggtcaatgtgggtgccaagctgctcaccggcgaagaatatggcggccacgccttctgggacaccgaactgtttatgcttccgtttttcgcttatgtgttcccccagacggcccggcacctcgagtcctaccggtaccgtctgctcggcgcagccgaggccaacgcggccaagaacggattccagggtgcgcaatacccgtgggaatccgctgatgatggcagcgaacaatgcccggactggaccatcgagccggatggcacctgctaccgctgctatgtggccgtctatgagcatcacgtgacagctgccgtggctttcggcatcgcgaactacgcgaccatcaccggggatacctcgttcctatacggtcgtggtgccgagattctcacgcagaccgcccgtttctgggcaagccggtgcgaatggaaggaagacgccggacgttacgaaatcacccaggtaaccggtcccgacgaatggcatgagcccgtcgacaacaatacgtacaccaactatttggcgcgttggaacatgagatatgtaatcgcgctcgtcgaccgcatgcagcgcgaacatccggacgactatgcggcactgattgccgccaccggattgacggatgccgagcttgcatcgtgggatgccatacagtcgaagatctatttgccccgcaaggaggacaccgacctgctcgaacagttcgagggctatttcgatctggagccggtgaccatcgaagaatacgacaagaacgactggccggtacggcctgcggcgctcaagcaattcaaaaccagcgagacgcagatcatcaaacaacctgatgtggtgatgctgctgcacctgctcggcaacgaattctcccagcaggaaatcgaaaccaactatcattactacgaaaagcgcacgttgcatgggtcgtcattgagccccagcatctacgcgatcatgggattgaaggttggagacgattccaaggcctaccgctatctgcgacgtgcggctatgctcgacctgctcaacctgcagcgcaacacccgtgagggcatccacgcggccaatgccggtggcgtatggcaaacggtcgtgttcgggttcgccggagtgaacatggacgacgatggcgtattgtccatcacgccccacatgccccacgaatggtcgtcgctgacattccgtctgcacaaccgggagtcgtggctcgagattcgtgtcggtgcgaccaatggtgtcgatgtggaggtgcttgacggaccgtccgccatcttacgcatcaacggcgagaccgtgaccgtgcccggcgtgaaggatgtgtcatgaagcggggtatggccgttgccggcctgattgtcgtgaccgcgatttggggcggtggattcgtcgccagcgatatcgcgctcaatagcctgacgcccatgcagatcatggccatccgattcctgcttggtgcggtgctgatgagctttattagcgtacgcgagttccggaacatcaatctcaaagaaattggtgccggtgtgcttatgggcatcgcgctgttcgcggccttcgcgctgcagattatcggcctgcaatacaccacgccgtccaagaacgcatttctcaccgcattgaatgtggtgatggtgccgttcatcgccttcctggtgctgcgcaaacgcgtcggatggcgtggcgtactgggggcctgcttgtccgttgtcggcgtggcggtgctttcgttgaacggcaatatgacgctcggtttgggagacgcactgtcactgctgtgcgcggttggctttgccttccaaatcttcttcaccggtctgttcgtgcagcggtaccgtgcgacggttctcaactgcgtgcagatggtcaccgcattcgtgctgtctgtggttgcgatggtggctatgggccaggtgcatctgacgccgacgaccgacggatggtggagtgtgctgtacctcggcgtggtcagtaccaccatctgctatctgttgcagaccgcctgccagcagtatatcgacgagaccaaagccgcgatcatcctgtcaatggagtccgtgttcggcacactgttctccattctgctgctaggcgaggtggtcaccccacgcatgattgtcggatgcacgatcatcctcgtggcggtcgtcatctccaatctggctgcgtcctccgaagacgaacagcccacagacacgcctgttcccgaaccatccggcgaggtttcgggttgattgcccgtctgattcacgccatgcacaccacaatcattcgcaaatgagcaaaggagccatccatgcgttatcaagccatcattttcgatctcgacggcgtaatctgccgtaccgaccaataccattacctggcatggaagcaggtggccgacgagctcggcattcccttcgacgagcaggtgaatgaacggttgcgcggcgtgagccgtatggccagcttcgatatcatcctcgaacggtatgacggcacaatgagtgacgaagagaagattcattggaccgacaagaagaacgagatatacaagtccatgcttacgcagatgggacccgacgacatgttggaaggtgtggccgacacactgcacaagctccgtgccatgggacttgaccttgccatcggctcatccagccggaacacgaaattcatccttggccagctgggattgtcggatttcttcgatgccatttcagacggtacgaacattacccgttccaagcccgaccccgaagtgttcgtcaaggcggccgaatttctgaaccgcgcgcctgcggagtgtttggtggtcgaggacgccgaagccggtttgcaagccgcgactgccggaggtatggactccgccgcattcggcgagatcgccatacgttccgggcttggcacatggaacttggaacggttctccgatctgatcggcattgtcgcctaatcccagaagcgtcaaccacgacccgcaacgattcggattgctggtaatcccacttgtatacgtccgtcatcgggcgtatacgagtggaagaatgccgatttgcgggatgtggcggacttgcgcaaaggagtacatcacatgatgagcaagcagaacgattgggagaatccctccctgaccggtcgtaaccgtcttgccccgcacgcctatttcttcggatatgagtgtgaggcggatgcctctacctatgagcgcgaacgctcatacggttatcagagcctgagcggtgcatggcggttccgcctattcaatggcccggccaccgtgccacagcaggcgttgctgtcaatcgccgatgattgggatgaggtgcaggtgccgcatatgtggcagtttgacgggtatgggggtctgcactataccgacgagccgttcccgttccccgtcgacccgccgctggtgccgtccaccacgcctacgggcgtgtaccagcggatggtgaatatgcagccggctgcagatggtgagcgcattattctgcgtttcgatggtgtggacagttatgctgagattcatgtcaatggcacatacgtcggcatgacgaagggctctcgcttgtcggcggaattcgacgtgaccgatgcggtgcatgcggggttgaacctgttcgtggtcacggtgctgcagtattcggatggtacctatcttgaggatcaggatatgtggtgggcatccggcatcttccgtgacgtgtatgtggtcagacgacctcagacgcatctcaaggacttcatggttcgtactcatcgtgtggatgatacgctcgcacgggtcaccgtgcaggcttggaccgaaggggagtcctgcgtcgaatggaccattctgcgtgacgggaatatcgtgtccgccgcgcattcggattcgggcgaacgtgccgtaatgaatattcctgaccccgaatattggaatcccgaacatccgttcctgtatgacatgcgtatgcgcatcgtcgggcgggacggttctgacgaaatcgtgccgcatcacctcggactggccgaagtcaccgtcgaggatgggctgatgtacctgaacggatcgtacttcaccatgcacggggtcaaccggcacgatagcgacccgaggcatgggcgtgcggtcagtatggagcgcgtgcgccgtgatttggaaatgatgaaacggcacaacatcaacgccgtgcgtacgtcacactatcccaacgatccgcggttctatgagatgtgcgacgaactgggccttatggtcatggccgaaaccgatttggaatgtcatggattcgaaaacgtgggcgacatcgcactcatcaccgatgacccggcatgggaagttccctatgtcgatcgcatcgagcggcatgtgatgcagcagcgcaaccatgtctccatagtaatgtggtctttgggcaatgagtctggattcggatgcaatttccgtgccgctgctgaacggtgccggcaacttgacccatctcgtcctgttcattatgaggaagatcgtttcggcgaatcggtggacgtgctgtcgaccatgtattcgcgtgtctcccagatgaacgatttcggagagcatccggctaataagcctcgtgtgatctgcgaatacgggcactcgatgggcaacggtcccggtgggctgagcgaataccagcaggtgttcgaccgttggccgagtatccagggccattttgtctgggaatggtccgatcatgcggtggcaatgagagggggtcgtttggcgctattggccgagcgtgaggtgcaggccaaaggcgtggaccctaatgggctggacgacctgtggtatgcctacggcggggatttcggcgattaccccaccggcggaaacttctgcgtggacggtctggtgttcccctggcaggagcccagtccggggcttgctgaatatcggcaggtgatttgcccggtgaaggtcagctgcacctataccgaggaggatggcaccgctctgcttggcattgatagtcgtcggtatttcactgatttgtccgacactcggctgcgggtgtctataagtgtggatggtgaaatcgtggacacgacactgctggaggtggggcccgtgcccccgctcggtcacatggacataccgttgcgccgtgaagcgctgctggaacaccatggccgtgaagcgatgctcacggttaccgtgctgtccgtggaacagcatgagtggtgtgatccggatgagccgctgggctcctaccagttccggctgcatgccggtcagggtggctatggcccggtgcgttcgaatgatgggtcggcgctcgccgtgacctctcccgttcgccaaacattgtccaccgtcgaagacgaacggtatctgaccattcgcgccggtgccatggtgcttcggtttgacaaggcgctcggtgccatagccaactggagcgatggcgatcggaacgtcattgattcgccgatatgtttcggcctgtggaaaccattgatcgacaaccttacgcaggaatactccgcgctctggaagccgtattatctggacgtcatgcagacggacactcgtggcgttcaatggcatgcggaacgcgaccaggtgatcatcgaggtcgagcagcgtctcgccgctcctgtggtattggccggcatgcgaacgagactgacctacacagtgcatgccgacggccatgttgacgtcgcggtgaccgccaccgcctatggcgactaccatgacatcattccgcgccgaggcctgtccttcactattccgcgggattgcaggcaggtcgcttggtacgggcacggcccgggcgagaactacccggattccctcgccgccaatccagtgggcgtgtggacgaatgacgtggatgccatgtttacgccctatgtgatgccgcaggattgcgcgaatcacgaaggcacccgctgggtaacgttccgcgacggaaacgggaacggtgtgatggtgacgcggacggcgccggccgatggtgagtccgaggcgttctccttctccgcgtggccgtacagctgcgctgatatcgacaaagccaagcatgtgaacgagctgcctgagggtcatggatcggttaccgtcaacatcaatgatggcgtgttaggtctcggatcaaattcctggggtagcgaggtgcttgattcgtaccgtattcgatttgaggattgtgcgttctcctttacgctgacgccgattcacgacgacgaacacgtcagccgcaatccgaactgtggtgcgggtgcagtcggtaaggaggtgcagtgatgcgactatacgacagcttggaaatgtttgataccggattgtctcatgtgcgcaaatggatgcgatgcggtcaagccattaggcaatcgacccgtctgccgttggacaccgcgtattcgctcggcgattcgctgaccttctgggcggtaccggcaggcgcgctcgctgatgatcgttatgtcgggcaccgccggtaccacacggtgctctcgcccatcgacgagccgttagccgtgtatgtccgcgcaaaaacggcattgcggccagccggtgcatacagcgacgtttcggatcgcgaatggtttggcctgccgaatgacgatgaggaaggcgtaccatgcgtcgtgcctgtcgggggtgtcctgattatggaagaatgcgaagcgatgcgcattaacgccactcccgaggccgtgggtcgcgtatcggtggtccgcgtcacggtggaggggttcacgttccccaataaataagagataattcaggtcctgtgcgggtgttccaatcgcccgttcaggaagatgccagccggccgaccgttccatgaaacggtcggccgacttcgtttttccgtgtacggttattacagtgaagagtctgctatgccgtatgcgcggtattgcattgccagcatggccgcatcctgtgttctcgttggagaactcgttgcggggaaccaataaagaaaggagtcgagcaatggcagcactacgtggtccggatagttccgaggatgaacgtcgtttgggggagcaagccgtctttcccgagaccgtcgatgtcaacattcgtcagcttgaccccattcccgcgccgcgtgccttcctcagggagcagccgctcaccgatgagatgagcgagctcgtgctccactcgcggcaggaaatccgcgatgtgctcaacggccgcgacgaccgactgctcgtcatcgtgggcccctgctcaatccacgacccgaaggccgcgcacgagtacgcagaaaagctggctgccgtcaagcgcgagctggaagaccgactcgtgatcgtgatgcgcgtgtacttcgagaagccacgcaccaccatcggctggaaaggcctcatcaacgaccccgatctggacggtcgcttcaatattcgtaagggcatgtggctggcccgcaaggtgctcaccgacgtgctgagcctcggcctgcccgccgccaccgaatggcttgaccccatcaccccgcagtacatctgcgacgcgatcagctggggtgccatcggcgcgcgtaacaccgaatcccaagtccaccgcgaactggccagtggcctgtccatgccggtgggcttcaaaaactccaccgacggctccatcaaggccgccgccgattcctgcttcgcggccggcttcgagcatcacttcctgtccattaacttggacggtcgcgtgatttccgccgaaaccaaaggcaacccggattgccatctggttctgcgcggttccagccacggcccgaactacgatgccgaatccgtgcgtcaagctctggaagacctcaaggtttccaaagcgtccggcccgagccagcatggcctcgtcatcgatgccgcccacggcaactgcggcaaagacgaaaaccgcgaagccgaagtcatcgaagagatcgctgagcgtctggcgcacggcgaacaaggcatcaccggcgtaatgctggaaagcttcttggtcggcggtcaccaaaagccggccccgctcgaccagttggtctacggtcagtccgtcaccgactcttgcgtgccgtgggaacgcaccaacgagctgctgcacaccctagccgacgccgtcaccgctcgcagctcggctaaatagctttgtctttgtaaaaatgctcactgggggctgcggacgttttcttggagatagtcatgcagccattccttggctttgacgatattgtaccggactcatccagcccagcgactgtttgatgcgctcgtggttgtaccagtggatgtactcgtcgatcaggacaagcacctcgtcgcgggtgcgtttctcccaatgctcgggatagacggactccgtcttcatgcgaccgaagaatccctccgcggcggcgttgtcggggctgcagcccttcgcgctcattgagcgcgtcagcccgtagcgttccatgagctccagccatccgggccaccggtagtggcatccccggtcggaatggaccacgggacgggcgttgtcgggcagcgtctccgccgcctcggcgagcatccggttggcgagctccgcgttgggatggaagccggccgtgtaggcgacgatcttgccgtcatggcagtcgatcatcggcgagaggtacaccttcccgtcgctggccttgatctcggtgatgtccgtgagccacttctcattgggccgttcggcggtgaagtcccggttgacgagattaccgggagcgggcgtggtctccccctcgtaggagctgtaacgccgccgtttgggaacatgcgccgagagcccgccctcggccatgagcctgcggatcaccttctccgagacgcccgtcccgagcgcggccttgacgcgacggtacccgtacctgcccttggagtcggcgaacgcccgcgccacgcgggcgcgcagcccggcgtacttgtcaacgccgatcctggcatggtggtagtggtagctgctcggcgctatgcgcagcaagcaggccatcgacctcagcgaatacctcggcctcagccggtcgatcagcatcgtcttctccctgttcgacaggcgccgcaggtcggcgcctgggtctttttttacgacctccaccacctcccgcatcaacgcgttctccaactccagctcctcgaccctacggcgcaacgcctccacgtcatcgccgcccccggcatccgccccgccccgaggacggacggacgccgatttcccgccctgggcggcattctggttccggggctgcaacgcggccatgccgcccctgcggtacgccctgacccagttgtgcaccgcaccaacgctcacgccaagctgtttggcggcctgcttctgctgcatgccgcccagcaccagttcgatcgccttccgtcttgtctccagaggaattatgggtttggccatacggccagcataccggggatccatcgccagccagcgttccaggcactgtctggtcggatagcccaggcactccaccacctgcgcggtggtcatcggcgttgtgaggtatagctccaccgccctcgaacgctcctcaagactgaacatacgagaaacctttcgctcagtctccaagaaaacgtccgcagccccctgagacccactcagtgagcattttttgccaataacggtggtcatgtcagtttgttcccgtgacaccttatccttgggaaagatactgatccaaggagagatgttatgcagcagcaggaggaagcagcacattcgctgcatccgttgcaagtcggtccgcagccgttgaacaccccggaagagcttcgcgccattcgtcaggcgatgggggaggggaagaacccgctcgttgccactgatgtgccgcgctgggaagatcaggtgggtgtcagtcgcatcatcaaccgccgcgtattggagctggagccgctgcccacgcccgcgcaagtgctcgctgaactcccgctgaccgatcaggctcaggaaatcgtcgcctactcgcgtgatgagattcgcgcgtgcctgtacggccaagacgacaggttgttggtcatcgtcggcccctgttcggttcatgacccgaaggccgcgctggactacgcgcaccgattggccaagctgaaggacgagctcggtgagcagctgctcatcgtcatgcgcgtgtacttcgagaagccgcgcaccaccatcggctggaagggcctgatcaacgacccggatattgatggcagccacaatattcgcaaaggcctgttgcttgctcgcaaaaccttgcttggtgtgctgaaggaaggattggcggccgccacggaatttctggagcccaccagcccgcagttcatctcggacgcggtgagttggggcgccattggtgcgcgcaacacggaaagccagatccaccgccaattggccagcgggctttccatgccggtcggcttcaagaacgccactgacggctcggtgaaggcagcggtcaacggttgcttcgccgctgctcagcagcacacgttcttcggcattgaccatctggggcgtgcctgcgcagtcgagacccttggcaacccggactgccatgtggtgttgcgcggctcgattcacggcccgaactacgatgccgagtccgtggccaaagccatggaagacgtacgcgccgaaatgcccgccgaatccgcagcctcgcacggtctgattgttgattgctcgcacggtaactccggcaaggacgagcatcgtcaggccgaagtcgtgcgcaatattgccagcagaattgcagctggcgaacagggtattaccggcatcatgatggaaagctttattgaagggggcaatcagaaggccgcgccgcttgatcagctggtctatggcaagtcgattaccgacaagtgcatcagctgggaagaaaccgaggtcttgctgcgcgagcttgcggaagccgtggccacgcggcgttggcactgagttgcgtcatcggctctctcgggggagcaatgtgacgaaacgtctctacccctcagcctgccattcggcggccatctcccctgacaaggggagccgaaagtgttgtgaaaggaacttacgtatgggtatgaaaactgtagctattattggcgcattggatgaggaagtggcgctgatcgccaaatcgctcacgcatgtgacgcacaccgccaagggcagccttgacatcgtgtccggcacggtcgactccttcggttctgacgtcatcaaggttgccgcaacggtaggcggcatgggactggtcaatgcggccgccaccacgcagctgctgattgacgagattgccccggacgccgtgattttcagcggcatcgccggcaacctcaacacccacctgtacatcaacgacgtggtgctcggcggcaccctgcgctacctcgacactgacatgcggctcgtaggccagtggaagcccggcactgcggacgctccggtggaggaattccactctgatgaccgtctgctggaagtcgccgacgaggcgcttgccaatgcgggcattacccacatcaccggcatcatcgcctccggcaactacttcgtggacacgccccaaaaggtcgaggaggtcatccgactcaccggggctgacgccgtggagatggaaggcgccgccgtggcacaggtcgccgcccgcaataacgtgccggcactggtgattcgtgccctttccgacaacgccgacaccgattacgaggtattcaaggagttcgacatctccgaatacgccgataccgccgcccgtctggctgtcgacatcgtcaagcgcctgtaactggtcacctccaagttcggcgttgccggtgtgggctggtacatggccatcatgactgccctcgctctgctcgctctgttcctgatcaaggaaagcaaggacaaggactacgagctgtaaatagagctccccatattatgctcccgccagcgggagcattttgttatgtcgtcccgccaaaaatgaacaatagacgaacttacgtagtttaggcatctcactacgcctcgcacgttttactctggaaatcatggatatctggcagatcgtcgtgattgtggtgctcgccgcgctgatactggtgtgggttgccgtcatcgcctacaacaaaggccgcgtttcaggccggctcgccgccgaacaggacctgtccggcgacgaggatacgcattctctattcggtgatgatgcgcccgtgcgccccaccgagcgtcgcctgattgaagtcctgcccgaagccctgatcgtcaccgaccgcaacggtctggtccaatattcaagccccggctcagtgccattcggcctagtctccggcgaccgactcaactcgcgtgaagtcgaggacatcctcactcaggccgccgccgacggtggcatgcgtgagcgtgaggttcagctgccggtcaatcgcaattcctatccgtcctctaatggccgaggactggaggccggccagtcacgcccgtccaacacgctgtatttgcgtgtgcgcattggcgatatcggcgatgacctgtacgccatcttcatcaacgacatgtccgagcagcgccgtttcgaggccgtccgccgtgactttgtgaccaacgtttcgcacgaactcaagactccggccggtgccatcgcgctactggccgaaaccgtgaccgacgccgccgatgatccggacgccgtacggtatttttccggccgtatctccaaggaatccgcgcgcctgaccgaactggtgcatcatcttatcgacttgcagaaagcccaaagcccgcaaagcgtgatcgatgcgcggcgcatttccgcgctggatgtggcacgcgccgccatcgccgccaatcagacccaagccgactcccgccatgtggatatccgactgagtgtcaacggacagtcagtacccacgaaggtcgaggagccggccgatggcgaaggttccttggaagaatcaggcagcccagccacgaacggtccgatgatcaaggccgacaaagaggccatgcaaaccgccgtcaagaacctcgtagagaacgccatccattactcgcccgaacacaccactgtggcggtcggcgtgggggagcgcgatggcaaagtcaccattcgcgtggtcgatcagggcatcggcatccccgccaaatcgctggaccgcattttcgagcgattctaccgggtcgacccggcccgttcgcgcgagaccggcggttcgggactcggcttggccatcaccaagcactgcgtgcaggagaacggcggtcggatttcggtctggtcgcgtacgggggaggggtcgacgttcaccatcgagctgccggccgccccggatgaggatgacgacgaggcccggtcggacgagtcgacacaagcgtagggccttggttggtgcccgacatggtgccattccattgccacacaatcacacagtgggcgaggtgcgcacaccgcgcgtagcccaattacgcaattacgtactttcgggaaacagcaggctaacggagaacaaatggttacgataatgtcggaaaactttgcgcctatgcgcacgggaacatacccaagaaaggctactatgacacgcattcttatcgtcgaagacgaggaatcctatcgcgagccgctggtataccagctcacacgcgaggggtacgacgtgtccgccgccgccactggcgaggaaggtctggaactgttcaccaagggcggcatcgatttggtgctgcttgatttgatgctgccgggcattgacggcactgcactgtgccgccgcattcgtgagcagagccgtgtgccgattattatgctcaccgccaagagcgccgaaatcgataaggtcgttggccttgagattggtgcggacgattatgtgaccaagccgtactctttccgtgagctgctggcacgtattcgtgccgtgatgcgtcgcaatcaggccactgcccaggcttccggcactgtggatgacgatattccgctggtgtgtggcgatatcgccatgcaggttggccagcatcaggtcaccgtacgcggcgaaaccgtgttcttcccgctcaaggaattcgaactgctcgaatacctcatgcagaacaagggccgtgtgatgacgcgtcaccagctgatcgaccgcatctggggttcggattatgtgggcgacaccaagacgctcgacgtgcatgtcaagcgcgtgcgctccaagatcgaggaagatccggcgcaccccaagtatctgactaccgtgcgcggtctcggatacaagatcgatactcccgcggagtaaatggaaggcggccttcgggtcgcctttttttgttgtggattgtgggctcgctgtggactcgccgcaggcgagcccgctccaaaaactacgtagcctcaacgtagcccacaaacatccaagtgttcatcttctgtttactgatttcggttttgggcccttgaaaccaccaatacgcttgtagttgtcatgaattgaccgggcagcgctgagccgcccgcgaatagttgatagagggattaagtaataatcatgcagaagaacatcctcgttcgctccattgccgctctgtccggcattgtgatgctcgcttccgtggccgcctgcggcgataacaccgccaccacgaccgacaacagctcctcctccgattccacttccaagtccaccccgatctccggcaacttctcgggcgccggcgcctcctctcagcaggccgctgttgaagcttggatcgccggcttccagggcaccaaccctgaggccaagatcgcctacaacccgtccggttccggcgctggcgtgcagaccttcctgaccggtgccaccgcttgggccggctccgacaaggcccttgccgatgacgaagttgagcagtccaagtccgtgtgcactgaaggcaccgccttcgatgtcccggtctacatctccccgatcgccgtggttttcaacctcaagggcgtttccgatgccggcaagcacatcaacatggacgctgccaccatcgccaagatcttcgacggcaagatcaccaagtggaacgatccggccatcgccgatcagaacaaggacctgaagctgcccgacaccgccatcaccgtggtgcaccgctccgataagtccggcaccacccagaacttcgtctcctacttcaaggacgtcacccctgacaactggacctacgacctctccgagaactggccgaacgaggttggccagggtgccaagggcacttctggcgtgatctccaccgtcaagcaggccgacggcaccatcggctacgctgacttctctcaggtcggcgacctgggcaccgtggccgtcaaggtcggcgacaagtacaacgagatttccgccgaggccggctccaaggtcattggggattccaagcaggacgacaccgttaagggtgacaaccgcatcgtcatcaagatcaaccacgccaccgaggccgagggcgcttacccgattgtcctggtctcctacgacatcgtctgcccggcctacaaggacaccaagcaggctgagttcgccaaggcttggctgacctacgtgacctccgacgagggccagaaggccgctcaggatgccgccggcaccgctccgctgccctcctccctgaagtccgagatcaccaagtccatcgaggccatcaagaccaagtgatgacgtcggcccgcaagggtcgtgtggactggacctgacaactgaacgatagactgtagtagtaagagcagtcgccgccaactttaagccgcagtcgtaaaccatacggctgcggcttaaagcgggtcaggacccgaacggtttggcaacgtcacagacgaaaaccgcaccacttgaatacttgataaccaccctatataaggagaatccgtgagttcgcaagacaaaacggctgtgcagccagttggtggcaagaccgccgacaaggtgtttcgcggtgtggcatacgcctgcggcatcctgatcctggttgtacttgccgctgtgttcctgttcctgttcttccgcgcctggccactcatcggtggcgatcaggccgccaacagccagaccgtgtccagctttaccggcggcaaggccagcagcttctggggctacgtgctcccgctgttgttcggtactgtgctcgtgtctttgctggcactgctgattgccttcttcgtgtccatcggcattgcgctgttcatttcgcattatgcgcctaagaagctcgccaccgcgctgagctatgtggtcgatttgctggctgccatcccgtccgttatctacggtttgtggggcggcctgattctggtgccggccatctacccgttctggaactgggttgccaaccacctgggcttcattccactgttcgagggcccggccgccaacccgccgcgcaccgtcgccaccgtggctgtggtgctcgccgttatgattttgccgattatcacctccatgtcccgcgatatcttcatgcagaccccacgcctgcacgaagaggccgcgctggcgctcggcgccaccaagtgggagatgattcgtctggccgtgctgcccttcggcaagtccggtatcgtgtccgcctccatgctggctctcggccgcgcgcttggtgagacgatggccgtgttgatgatcctgtccccgggcctcaactactccatcaagctgctgcaggcctcgcagaaccagaccatcgccgcgaatattgccgcacagtaccctgaagccaacgatctgggcgtctccacgctgatcggaactggtctgattctgttcctgatcacgttcgtggtcaacttcatcgcccgtaagcttaccgagaaagcgactgcgtgatgactgctgctgagaacactgaaaagactccgatggacggcgctcccgaaatcgacttcgatcgtttccgcccgacccgttccgccatccagcgccgtaatatcatggaccacttcatgcgggtcctgatcgcggtggcgtttgtgatcgcctgcatcccgctgatctccctgctgtggaccactatcgtcaacggcatcaagcgcctgaacctgaacttcctgagctacaacatgaccggtgtggtcggtggtaaccagaccccgtccggtggttacggcggtgtgctgcacgccatcatcggtactctcgaaatcaccgctggcgctatggttatctccattccgatcggtttgatgtgcgccgtgtacctggtcgaatactcgaaccgcggcaagctcgccaccacggtctccctgctcgtcgacgtgatgagcggcatcccgtccatcgtggccggcctgttcgccttctcgatgttcacgattctgctgggccccggtaccatcaacggtttcgaaggctccgtggctctctccctgctgatgttgcccaccgtggtcaagtccagcgaggaaatgctcaagatcgtgccgaacgatttgcgtgaggcttccttggctctgggcgttaccaagcagcgcacgattaccaagatcgtgctgcgcaccgctctgccgggcatcgtctccggtgccattctggccatcgcccgcgtgattggtgagaccgcaccgttgctgatgaccgccggctacatctccagcaccaacgtgaacctgttctccggccagatgaccaccctgccggtgttcgtctaccaggagtactcgaagctcagcgcgaactgcccgcccaacgccgacgccacctgcgtgaccacgattccgatggaacgtgcgtgggctgcggctctcgtgctgatcgtcatcgtgctgctgctgaacctcattggccgaatcgtggcgaaggtcttcgccgtcaagaccgaacgctaagccagtcgctaagcctaagccttaagaacacaaggaaatataaggaaacatcatgggacaacgtattgacgtcaaccacgaaaacatctactacggcgactttctggccgtggaagatgtgaacatcaacatcgagccgaacaaggtcacctccttcatcggcccgtccggctgcggcaagtccaccgtgctgcgcaccttggaccgtatgcacgagatcatccctggcgctcacgtcgagggcgaggtgctgctcgaaggcaagaacctgtacgacaaggacgtggatccggtggccgtgcgccgcgacgtcggcatggtcttccagcgaccgaacccgttcccgaccatgtccatccgtgagaacgtgctggccggtgtgcgcctgaacaaccaccacctggccaagtccgacgccgacgatctggtcgagtgggctctgcgcggtgccaacctctgggaagaggtcaaggaccgtcttgacaaccctggcatcggcctgtccggtggccagcagcagcgtctgtgcatcgcccgcgccgtggccgtccacccgcaggtgctgctcatggatgagccctgctccgctttggacccgatttcgaccctggctgtcgaggatctgatcgacgagctcaagagcgactacaccatcgtgatcgtgacccacaacatgcagcaggccgcccgtatcgccgactacaccgccttcttcaacctgaaggccgtgggccagcccggtcacctcgagtacttcgcggacaccatgacgatgttcaacaacccgcaaaacgaagaagccgagcgctacatctctggaaggttcggctgatcgtttcctgcgcgcagcgtaatgatttgtgcgtaggagaaacggcaaagcccgccgcaaggcgggctttcgcatattcagcgcgagtattgccgagtattaccgttctcgtaacggagcgagctggaatactttgtcggactgggcggcgacttcccgcttcggtcgatcgacgggagaacggcgggtaaagcggtacaagacaagtccgcacgatgaatactccgtgataaattttctgttaacgtgcgagtatgaaagaatggtcgcagcgaggtccagcaaaggagcataggtgagtactggtctgatcgtcagcatcgtcgttgtcgttattatcgttgtcttgattggttggggcgtcagcgcctataacaacctggtgacgctgaagaaccgtgtgaagaacggttgggcgcaaatcgacgtgcagttgaagcagcgcgccgacctcatcccgaacctggtgaataccgtcaaggggtacgcatcccacgagtctgaagtcttcactcaggtgaccgccgcccgcgccggcgtagtggctgcggccagcaacccgagcacgaccactgctcagcgcgccgccgctgaaaaccagctgtcccgcgccctgttcaacctgcaagccacggctgaggcatatccgcagctgcaagccaaccagaacttcatggatctgcagaaccagctcaaggaactggagaacaagatcgcctacgcccgtcagttctacaacgacgtggtcctgaagctcaacaccgccatcgaaaccgtgccgacgaacatcatcgccggtttgttccactttgaacaggcgcaatacttcgaggccgatgatgcctcccgtcaggtgccacaggtccagttctgacccgctccaggcccgtccggtaagccgccggccgggcccgtattgtcttaagagagggaagatatgtggatacgattcattcgcgccggaatcgtcagcattgttgccacggtggtgttggcagttatcaccttggcgataatcgagacttccgcgttcggcgattcggccgacctcagctaccgcacgctggactatgatgtgaccgccaccgcgaacggtgatttgaaggtcacgcagcatatcgacgtcaagatgcgtgagcgtaccgacagtgacgacaacaccaagccgtggaagcaactgtttcagcaatacacgctgaactccggcaccctgactgatatcagcgatatcagcgtgcgcaacgtcacagacggcatcgactatgcccaacagagcgagcccaagctgcccagtgacgtcttttccgacaaggaatggaacagtgactacgccaaccattggtatatcgccgatgtgagcgatggcagcgaccatccaaaggcatacacgcccggtaccgatggcctcaagcccagcgcctccgccaccgaagataacacgaccgtggagatcggctggaatattccggtcaccaccgaggccgacagtatgaagttcgacgtgagcttcaccatgcacgatgtggccaccaaatggaaagacgtggcctccttccaatgggagccgttcggcaagaagaaccaagtgcctatcggcacggtcaccggcaccgtccacttccccaacggcatcaccggcaaaacctcatgggcatggctgcacaccgagcgcacttcggaaaccaagcgcaacagcgacggcagctacacgttcacggcctacaacatccacaatggcgactacctcgatgtggtcgcggcgttcgatgccgccaaagccaagggcatcgcccgcaagggaaccggcaatcatctcaaggacctgaaacaggacgaatataagcaacagcagcgctggctcgacaagcaacgattcgctgccagagctcgtctcgtgttctggattgtcagcatcgtgctcggcatcgcgttgtgcgcgtggggtatctgggctgtgatctccagcaaccggcgtgcgcaataccgtggcagcgtcgaatactggcgcgaccagcccggcatcagtccggcttccgcagcccgtctgattcgcgtggtcgatccgtcgacgcgccaatccgatgaagaccgccagctgaccgccaccatgctgtcgctcgccgtcaagaaggccattgccgtctatccggggccgtcggacatgtatcgcggcatcgacatgagccaggccacgccggtgggcttgagccaaatgattgccgccgaccaaggcaagcagtatgcggcaggcatcaccagcaccatcgtgattctgccgctcgccattgatgaggcacccaacgcgcaacagttgggattgagcgaatcggaagatgcgctgctgaacctgctcatcgtcatttcgcagcgcgtgggcagcccggtattcgacctgaaccagatgaaggcgacctgccagaactggcaagacggctatattgagctcggcaaattcaccggtgcatgcagcatggaataccagcggctgggtgccacgcgctctgtgggctggcaatggattctccccggcgtactggccgtcgtgctgggatttggttcgctgctggccaacagctttatcggatacccggtggctggtcttatcgagctgccgatattcctggtcggcctgttctgctcgatggccggcgcggtgaccgtgctcaccgaccaaggccaggatatcgccggccggactctgggccttaagcgttatatggaagacttctccaacttcaccgaccgtggtaccgccgatttggccttgtgggattggtatatggtctacgccgccgcgtttggcatttccgatcgcgtgatgcgtgagctggccaaggcctatcctcaggtcaacgatccggcttggctggatgccaacgcctccaactcgttgttctactggaactaccgcccgtatggctggtacagccaccgccacaatgacgatgctgccgggcagatggacccgggcattagcggcccagctccggcttacggaggcacgtcgtttgccggcggattctccgacctcggctcgcagctgaactccggactcgctgacatcagctcgaccatcagcgcggcagcaccatccgctgattccggtggcgatttctccagcttcggctcgggcggcggctccggtttcggtggctcgttcggtggctcgggtggcggctcgttcggcgggcggtaaatccagcgttctgcttacgctggaatcggacacagaccgtctcattactgttgaagggaatcaccatggcattgttccgtaacctcggaccgttctccaccaccgccatcggccacggcgaaatgccgctgaccatcgaaaacaatcgtggccacgaggtcggcatcgaaaccctgcatgcctcgctggacgccggctgccgtcacatcgacaccgcttgggcctactactgctccggcggcgaagaacagaccggtgaaaagctggtgcgcgaggcccttgagacctggaaggggccgaaggacgaggtgctggtggccaccaaggtgggccacttccgcaacttcaccgacggccgccccacgtgggatgtggacggtcgcccggagaacctgattcgtcgcggcaaggagagcgcactggcgctcggcgtggacaccattgacctgctgtacttccaccgccccgatccgaaggtgccgtacaacgagtccgtcgaagccatcaagcagctggtggacgagggcgtggcgcaggaggccggtatctccaacgcctccatcgagcaaatcgacattgcgcgcggcattctgggcgacaagctcgtggccgtgcaaaaccagtactcgccgattcacctggagacccaggacacgctcgactactgcgccaaggttggcttggccttcgtgtgctggagcccgctcggcggctaccgtcacccctatgatgagaccaagttcgacccgttccgcgaggtcgcggcggcccacggcgtgagctaccagcaggtcgtgctggcatgggagctcgccaagggcgaccacatgttcgtgattcccggcgcgcaccgtcccgaaaccatcctcgactccctgaaggccgaccagctcgaactcacccccgaagaactcgccaagctcggctgaactttctcagctccccttgtcaggggagctgtctcgcgtagcgagactgaggggtagtcgccggagtagtcccgggtagttccacaaggagataattgtgcgcaaaaaactcatcctcgacctcgataccggcatcgatgacgcgctcgccatcgcatatgccctaggcagtgccgacgagatcgatttgatcggtatcacggccacctacggcaatgtcgcggtgccgctggccgcgcgtaacgcgctggcggtactgcacttgttcggccgtgacgacgttccggtctatcccggagtcgaccatcccatcgccccggcaacattgccgaaagtgcgtggcaccacaccagacgagcgggcccaggcctacgcgcgctggcagaacggcggcgcggacggctggcaaacggacgcttcgtggtcaccaactcccggctcggtggcggtccaccattccaacggcatcggcggcgcaatcatccccgactccccgcgcgctccggaagcaccaggctcggcggtcgatttcatcatcaccgccgcgcgcgaatacggcccggacctgaccatcgtacctacgggcgcgatgaccaccatggccaccgtattccgcaacgctccggacttgaaggattccggtgtgaacgtgacgttgatgggcggtgcgttgacgctgcccggcaatgtgagcccggctgccgaagcgaacatctcccaagacccagaggcagcagactatctgttcaagtgcggcgcaagcaccaccatgatcggcctcgacgtgacccaccagaccgcgctcacccgtgagaaagcccatgaatgggcgtctttggggacgccggccggcgacttcctcgtcaccatgaccgactactacatcgacttctacctgaagaaccagccggagattcacggatgtggactgcacgacccgctggccgtggccgccgcgctcgacccatcgctggtcacgaccttcgggttcaacttgcaagtcaatctcgagggcccgttccgaggccgtaccatcggcgatcgttcacggctccaggatcccgacaaacacacgcaggtcgccttgggcgtcgatgtgccggaattcctggatcgtttcatggggcgcgtcaccgcggcggcccggtgacgcggacggcggccgtccggtccgctccacgccgtggatggatatgacccatggcgtggagcgcccttttgggaaccgacagaacataggggggcgctgcatgcgcagcgcccccctatgtgtcagatcatgccgcagcccggaatcaggccgccgggcggatcgagcgtgagatattgctcctccagatcgatgtcggggaccaaggcctccacgaacgggaccaacgcggtcttttcgaccacatcctcgcccttggaattctggccggttaccaccggctcggtcaaacgaatcttgagcagggattgggcgggggagtcgatcacatccaccactttgccgaccacttggccggcgggcagtcccagaccgttgccctcgactagacgggcctcaaggccaataagatccttgggataccactcgtcggcctcgagcatgtcctccgcatcgtcgacctcgccgtagagttcgacaccatttagggcctcggcggcattgcggtcgtcgacgccctcaagcttgagaatccaacgatccttgaacgtgcgcgagccctcgacgatgtactcggtctcgccatcctggctgtagagcacggagtccggctcgaagcgccactcgggatcatcggtgtacaggcgcacggtgacttcgcccttcaggccctgtgcgcggccaatacgagcgaccctcagcaactcgagctgctgagggtcgtcgtgcatgtcttgctgtgtcatgctgtgaatcgttccttatcggttatcgacggacgtccatgatgtcaacgcggaccttgtgatcagacagtgcctgaatcacggtgcgaatcgcgttggcggtgcggccgccacggccgatcacacggccgatgtcttccgggttcacgcgtacgcgaagcagttcgccgcgcgcgttctcatgagacttgacggaaacatcgtcgggaaaatcaacgatgttcttgatgaggtgttccacagcttgtgcaagcatagctagcctttcgtttccgctcaggcctcagccggagcttcttcggcggcctcttcagccggggcttcctcagcggcggcagcggcttcggcttcagccttggccttggcagcagcttcggacttggcggccttcagcttctgagcctggtcctcaacggccgcgatgcgggcctcggcgtccgggccagcctcaacggtcttcagggtgccttcggcaccttcaaggcccttgtacttctgccagtcgccggtgatgttcagcagcttgaagacgggctcggacggctgagcgccgacgccgagccagtactgagcgcgatcagacttgatctggatggtcgagggctgggtgttggggttgtaggtaccgatctcctcgatgaccttgccgtcacgcttcttgcgggaatcgacgaccaccacacggtagaaggcgtagaacttcttgccctgtcgcttcagacgaatcttggttgccaaaatggctctccttgtaatgctaggtgtgcgggttctcggtttgccatgtggggcatggccgtccggaatccacgtgtcctcgcggctcggggtgtagagggcgccacgcgcgcgcgaataactggcctattatagcgcacagggccggactgggcgtggcgcactgtggttgcggtgtggtgcgcgttccccgttgcgcaacattccggggaatgtatcgcgaaaatgccggctatcgcagtgcaagcgttgcggtcagggccagatgatcagtgccctcgacctcaaacgacttcacgccggacggtttgagcccgggagtgaacagcacgtgatccagctcgatgcgcggccacttgagccagctcgggaaggtgagattcgggccggcggcttgaatcagacttgcgtccttgaatccggacttgagcaacgcgcggaagctcggatggtcggtgctcgagttgagatcgcccataacgacgacgatattgcgattgctgacggattttgcacgggcgagttctcgcagacccaaaatgccggccgaccaatccgcgcagccgcgcatcggcgatttcgggtgagccgaacaaagtgtcaccgtgcgattaccggaggttttgagggtgatggcgggaacgtcggcggcagggatggagaccacgttgggcaccgctgcgctcggctcgtagcgggaatagatcacgttgaatccgccattatcggtctctttggcgtctccgaactgatggtaggggagaagttcgttgatgtcggcttcggtaagacgtgtgatgaggtcgtcggtgacttcctgcaaggccaatacgctgatattgcgttcgcgaatattgcgaatgatttcagcggcgtcggcgcgtccgtatcgacaattcatcgtcataaccgagaactggggcgagagtgtttcacgcgttgtttcacggtgtccatcggagatggtttcgggcccttccttcggagtgtttgaggtacccgatgtattgctgttatggctttttgacagcgtcggcgaagttgtttcacgggctgtttcacggtgggattctttgcgtttcccggccgggtcgattgacgtaccccagtagttgatgcgctgtgagctggcaatcagcgcgaccacaataagcaacgacatcgcagtccattcatgttgccatgcggcgaccgcggccagaatcatcaaaggaacccacaacagcggcgtcagggcaatcatgtacggaagcggcatacgggcctcgagaccggcgggcagcgcgcttaaggtcgtccataacagtgcgatgattgccaccgcgctgaggattgtcgtcatggaagttcctttcgaaatataaattgaaccgagatataatttggctcccctctgcgaggggagccaagttgtgagatcagcgaccgaacagtccgccaaggcctccgccgaggttcggcggcagttcagtgccaccgtcgacgttgcccatcatctgctcaaggccagcgggcagggccgggttctgtggcttcttggcgaaggcggaaccgccggtcgaaccggaggacttgccggccagcttatcgcgcaatgccttctcctcggcctcgcgcttcatcggattgccggacttgccgcccttcttcttgttcttgcccttcttcttgccgccgcccatagccgggccgccgaagccggggatgccgccgcccatgccgccacgattggacatgcgcttcatcatctttgcggcctgctcgaaacgctgcagcaaagcgttcacctgagaaaccgtcacgccggaaccataggcgatacgggcgcggcgggaaccattgataatcgacggatcgcggcgctcggccggggtcatcgagcgaataatcgcctcggtgcggtcgatttccctctcatcgaactgctcgagttccttgcggtgctgggccatgcccggaatcatgccgagcagcgacttcattgagcccagcttgcgcacctgctgcagctgatcgaggaagtcgtccaggccgaaggaaccttcggagattttctcggcggccttgcgggcctcttcctcatcgaactgcttctgcgcctgctcgatgagcgtcatgatgtcgcccatgtcgaggatgcgcgaggccatgcggtccgggtggaagacctcgaagtccttcaggccctcaccgttggaggcgaacaggatcggcttgccggtcacggacgccacggacagcgcggcaccaccgcgggcgtcgccatcgagcttggagagcaccacgccggtgaagtccacgccttcgtcaaaggccttggcggtcttgacggcgtcctggccgatcatcgcgtcgatgacgaacaggatttcgttgggacgcacggcatcgcgaatgtcgcgagcctgcttcatcagctcctcgtccacgcccagacgaccggcggtatcgatgatcaccgtgtcgtagagcttctgcttggcgagttcgatggaatcgcgggccaccttcaccgggtcgccggaggtctggcccggagctgcgacggcctcgccgccatcggattggacgcccttttcgggagcatagacgggcacgccggcgcgttcgccgaccacctgcagctgcgtcaccgcgttcggacgctgcaaatcggccgccaccagcagcggcgtgtggccggaatccttgagccagtagccgagcttgccggccagcgtggttttaccggcaccctgaaggccggcgagcatgatgatcgtcggcgggttcttcgcgaagttcagcggacggtcgacgccttggccgagcacgtcggtgagctcctcgttgacgattttcaccacctgctgggcggggttgagtgcgtcggacacctcggtgcccagtgcacgctcacgcaccttgccggtgaaggaacgcaccacgtcgagcgccacgtcggcgtcgagcagcgcgcggcggatttcacggatcgtgccgtcgatatccgcctcggaaagcttgcccttgctcttcagatgcttgaacgcattcgagagtctgtctgtcaaagatgaaaaagctgccataatgggcaacagtttagccgccacgcgggaaattgcggtgttggggacgacgcttttcggggaatgtgccgcgtagtagtcagggatgttgggcattcagacggcaaatgccgtgccgtccgctcgtggcgaagccaatcgagtgcttccgataccatggaaaccgtaaagaatcctgtgttttttggaatacttacgctgttttgaaaatcgctggacaccgcttatacgcagactgccgtgcgctccgaaccatgacgttcgggccaacgcagacatgccgtgcaataaggaaggcccactgatgcccacccaaaaactactcgaacgcaaagccctgatcgttggtatcgtcatcaacgtgctgcaggtcttagccggcatggccgtgttcttcatgaccggtctcaaggccatgttcctcgacttctccttcaccgcgatttccgtcctgtccggaatggtggcggtgtacctctcgtcgcgcacggtgcgaaccaccgagcgcttccccaatggcatgttcgcactggaacctatctacgcgatctgcaaggccattttcaccatgtcgttgttggtgtattcgctgattgacgtgtgccgagtagcgtacgactacttcgtgttcgggtccggcgaacgcattgaaaccggcccggtggtcatctacgagatcctgaccgtaatcgtgtgcttcagcctatacacgtattaccggcgctccaaccgatccatcggcgattccagcaccatgctcaccgccgagtgcaagagcacgttggtcgacggatcgatgtcgttcggcatcggcgtagttgccatcttcctgatgctgctaccggccggcggtccgcttgacttcctgcactacaccggcgatttcttcatcaccgtggctttggtggcattgaccatcaaggagccgttcagcgtgctcaaagaggcgttcgtggaattggtcggcggcgtgcatgacgacgatgaaaccaacgcctacgtggaggccgaggcacagcgccatctgcctgccaacaccgactacgagcagacgctgatcttcaagaccggtatgaactacaccgttgacgtgtatctgagcggcatcggcgaaaccattgatgtagctgacctcatcgaatgcaagcgctcgctggaaaaggagctcagcaagcgcctgcacatcgtggacgtggacttcgtgtttgactgattgatgggtttgaagcgactacttcagactccaagtggaaccctgcgggccgtcttcgatggcgatgccggcctcggtcagggcgtcgcgaatctgatcggccttggcgaaatccttggccttgcgagcttcggcacgggcgttgagctgttcggcgatcagtgcctccagcgctgcatgctcgggcgactcggccgtgccatcagcggcaccgccggcagcgccggcggacacccacggttcggccagcgggtccaggcccaaggtgtcgagcatggcacgcacggcgagcagcgcctcacgcacctcggccttggcggtttcggaatcggcgcggtcagccagctgtgaaagcaacgtattgccggaacggatggcggtgaagatcgcggcggttgcaccagacacattgacatcgtcattcatggcggccacgaaatcggcgggcaaatcgtcggcggagacggcagtgacttcctcgcgagaaggctgtccacccagcgccacaccggcacgctcgatgaagttcgagacgcggtcgtatgcggcctgcgcctcgaccagcgcctgatcggaccattcgagcatcgaccggtactgcacggagcccagggcgtaacgcaccacccaagcggaatgctcagccaacacgctcggcacggacaggccggtgcccagcgacttcgacatcttctcgcccttggcggtcacccatgccgaatgcatccagcgcgcagcggaggggtagccggccgcacgggtctgagccatttcgttttcgtggtgggggaagcgcagatccaagccgccgccgtgaatgtcgaagccatcgcccaggtaacggtgggacatggcggagcattcgatgtgccagccagggcggcccacgccaaacggcgtcgaccaacgggcgtcctcgggatcggtgtccttcggagccttccacagggcgaaatcacgcggatcatgcttgtcgggggaggcgtcggccgggtcgaccggattgtacttgtcggcaccggtggcgtccacggacgggcccatgcggtcggccacggtagcggcctcatcgacttcggaggtctgcttctggtgggtgagttcgccgtaatgcggccaggatgccacatcgaagtacacgttgccggtgggcttgccgtccgcatccgtgaccacatagccgtgtccgttgtcgagaatgcgctgaatcaggtcgatcatgtccgacatgtggccggtggcgcgaggttccacagtgggcggcagtacgccgagcgtgttgtatgcctcggtgaattcgcgctcgtagtaataggcgcgggcccaccaacgctggcctgcggccgcggccttaacgagaatcttgtcgtcgatatcggtcacattacgcacaaaagtgactttgtagccgagcttcaaaaaccagcggcgcacgatgtcgaacgccacggcggcacggatatggccaatatgcggtgacgattgcacagtcgcgccacacacataaatgccgacttcgcccggcttgagcggcacgaaatggctgacctgatgcgaggcggtgtcatacagattcaggccttctgcggccttggcaacatgcactggcgtcaggcttgaaggcatgacggaaatgttgaaatcctgcggttcttggctgtttcccataacactcaagcgtagggtccgaaccagacatgctgaatcgttactcgaagagtttgatgaacgcttcacaggtggggcccgaacgaggtgacagacggatgagaagcgggacaacagtctcgcgagaacacgtctttgaccgctgcggaaactgcgagattcatggatttgccctgctcgttacgcaaacggggaatgctcgtgccacaatagaagtcatggccacaccacaagtgctcattttgcaacatgtcccatgggaacgcccgggacgcatattgtcgaacctcgaggacatcggtcttgagacggtgacgatgaatatcgtcgacaaaaagaaaccggacttgcctgatttcggcgaactggctggcgtggtaatcatgggtgggcctatgggcgcgcttgattacgataagtatccggggctgaaggcagaagccaagttggcgcgtgccgccgtggcttcaggcaagccgattctcggtgtatgcctggggcatcagattatcgccactgcgcttggtgcgcagctgcgcaagggcgatgcgccggagattgggttcgcgccgatcaagcgtgtggacaagcatgacttcttctccatgtgggataagcagctgacggtgctgcactggcataacgacgtggtgggcctgcccgcggaaggccagctgctgtcgcgttcgtcttccaccaaggtgcaggcattccgactgggatccgcgctgggcatgcagttccacctggaagtgtgcggctcgctgctggacgaatggctggatgagccgagcatggtcaaggatctcaaggccgcgggtggttccaagtcccaattgcgcgagcagttcgcccaatacgaccagctactgcaaccgctcgccgagcaagtgttctccggttttgcggcccgctgcaactcctacgctcagacgctgaacaaataacgtttgcgggccgccgctgggcaagcgtggcgctacattggtgagtcatgccgacttatgacattggactggaacacgtttcgctcgctttcgctaccaaaaccatcttcactgatgtaacgcagggtgtttttgaaggcgaccgcatcggcatcgtcggcaagaacggcgacggcaaatccacgttgctgcacctgttccgcggtgctcaggagccggattccggccgcgtgacaaagcgtggcggactcacgttcggcatgcttgaccagcgtgatccccttgatgacaacgccaccattcgcgaagccgcacttgaggggcgcgccgactacgaatgggcgtccgataacacttcccgtgaaatcgtcgaggcattgctcggcggcatgagcctggatgccaaggtcggctccttgtccggcggccagcgtcgccgcgccgatttggcccgactgctgctcaaggattgggatattcttgcacttgacgagcccaccaaccatctcgacgtggtcactatccactggcttgccgaacatttgaagaaccgctggtccaaaggccagggcgctctgttgctcgtgacccacgatcgctggttcttggacgaggtctgcgaatcgatgtgggaagtccacgatggcgtgatcgagccgttcgagggcggctattccgcatatatgctgcagcgcgtggaacgcgatcgccaagccgatgtgcgcgaaaccaagcgccgcaatctggctcgcaaggagctcgcatggctttcccgcggtgcccgtgcccgctccaccaagcagaagttccacgtcaaggccgcacgcgaattgattgccgatgtgccgccgatgcgtaacacacttgaactgaagcaaatggccacctcccgtctcggcaaacaggtggtcgatttggtcgacgtgacgcagattttcgaaaaaccgcagggcatggccgatatcgacccggatgtggcggcgctctccgcgtccgcttcccgcgtggatgtggtcaacgccatgtacgccgagccgcagctgcatggttccgttgaggtggcggtcaccgacatgactgacccgcgcctggtggacgccggcgtgccggaagccgtcgagtccgctgaggaagcgcgtaagaaggccgaggctgagagcggcaatccgcagcttgctgacgatcgcgaggttcgtcgcatgaacacgggtggtgaaaccatcggcggtggcactgctgcaacggattcggatgatgacactgctgcagccggtgtcacctcggctgcacgcaaggtgacggtttccggccgcgagattcttgacgatgtgacttggctgattggcccgggcgaccgcttcggcatcgtcggtgcgaatggtgccggcaagtccacgctgcttaagttgattgatggcacactcaccccgaccgcaggccatgtgaacattggcaagacggtgaagttcgcggtgctctcgcagcgcctcgatgagctggagaagctcggcaagtacaagatcaaggaagtgctttcccgctataagccgagctacattgtggatggcaaggaagtgacgccgggacagttgatggagcgtctcggcttcgaatccgcccagctgatgacaccgatccgcgatctctccggtggtcagaagcgccgcatgcagttgctactcatcctgctcgacgagccgaacgtgctcatcatggacgagcccggcaacgatctggacaccgatatgctcgccgtgatggaagacctgctcgatacttggccgggcacgttgattgtggtctcccacgaccggtacctgctggagcgcgtcaccgatcagcagttcgccctgctcggcggcaaggtacgccatctgcccggcggcgtgcaggactacctcgatatggttgaggctattaagaacggcaagggattgccggctgacacgcctggcttcgcgggcaccggtagcagctcggcgaagtctggtaagggtaaggcggccgccgtcaatgctgccgcatctctccctcagtccgcttcgcggacagctccctcgtcagagggggccaataacggtgaggactctacctcgaagctcaccggcaaggccttccacgaggcatccaagcgcgtgaatgccatcgagcgcaagcttgccaaactggaagagcagaagaccgatctcgaggcgcagatggctgcccatgacccgagcgactacgagggtctcaacaagctcaatgaacaactcaccgccgtcaatactgaaagcgatggtctcgaagccgaatggctcgaactctccgaacaattggagtagcgggagaaaccgtaacgttcacaaggcctcggcagtttgccggggcctcccgctatgcaaactcccacggattaatcaattccacgtcggtaccttcgaagtccttgatattgcgcgtggctatggccgcatcccaggaatgggcaattgccgcaatcatggcgtcttgaatactggtaggtgtgcccctgtgttcgcgttcgacaaggatatgggcataatccgcagctgcctgagtgtcaaatgcgaacgttctgtcctctaatgtcataagcgccagcttgacggtcgtatctgtgtactttcgtcgtttgccttcaggcatgcgacatattccggccaacaactcggcgacggtgatggcggtggttgccaaattgcttgtatcttggttcctcagccaattggcaacgtgttcgtctggctgtttcttgatgatttcgctgatgacgttggtgtccagaataatcatggccgattcctattcaaaagatactggcggtcgggaatcggcggaatttcgctcggatagtgggagttcccccttgtcgagtccctcaaaatccatgttcttcatgaattcgcggatctcgtcatagaaattggtctttcgcgtgatttcatgcgccaccgtgccagccagccattcttcaagaatggatcgcacctgagattccatggagcggttgtttttctcagccacttctttgagctgctgaatctgctcatcgggtatttttcggatggtcaatgttgccatgatgcacctccttgttgctgtcataatgctagcatgaggtgctgtcgttttgcttgcagtacgggtgatgaggtatgcacgcatgaaaaaaggcggatatgcatcatgcacatccgccttttgagcttggactgggtcttcccgcagtcgccgaatcagcgcccggtaacctcggaaccgacgaccttttcgctcagggcgcgcgggccgcgggtcacggctacggcaccggagcgcaccagctcaatcacaccgtaatgctccaaaagccccagcagggcgtcgatcttgccttcggcaccggtggcctcaatggtcagcgattccggattcacgtccaccacgcgcacgcggaacaggcgcacgatctccagcacgtcggaacggttggattcgttggcggccaccttgatgagcaccagttcgcgttccacggtggagttcgggtcgagctccacgattttgagcacatgcagcagcttgttgagctgcttgatgatctgctccagcggcacggcctccacgtcggcggtcaccgtgacgcgagagatgtccggacgctcggtgggggagacggacagcgagttgatgttgaacgcacggcgggcgaacaggccggcgatacgcgccagcacgcctgggcggttctccaccagcacggacagcgtatgacgctgggaaccaggctgggatgcaggatagttagccatgagtgttctcctctcctcagtgctcgctcgcagtggcagcggcggtctcgtgctcgaacacgccggtcgcatgctcgtccggaccggttcccggagccggggtgccgccagccagcggcttgatgccgggcttgtacgtcacctcgtcgttgggggcgccggcggctaccatcggccacaccatcgcatccttccacacgcggaagtcgatcagcaccgggcggtcgttgatctggttcgccttttcgatggcggcaatcgcctcttcctcggtgaacgcgcggatacccacgcagccgtatgcctcggccaacttgatgaaatcaggcacttcgagcggcgcatcgccgtcggccagtgccgccgcaccatcggcaccgtgcgcttcaccatcgagcaggttggtctgcgagtagtggtgctcgtagaacagcgtctgccactgacggaccatgccgtatacggagttgttcagaatcgcgatcttcaccggagcgtggtccaggaacgcggcggccagctcctcagaggtcatctggaaggaaccgtcaccatcgatcagccacaccggcttcttgccctcgaattcacgggccgagcccacggatgcgccgatggcggccggcagaccgtagcccatcgtgccgaggcctccggaggagatccaagcgtgctggttctcaaaatcgatgaactgcgaagcccacatctggtgctggcccacaccggtcacccagatggtggacggatcggccatctcagagagcttcttgatgacccactgcggggccagcgatccgtcggtcggctcatcccacgtcatcgggtattcctcgcgccagccgtcgatcgccttccaccagggggccagattcggcttgccctgaatggcctgcgtacgctgaatctcgggaatcaagtcgtcgagcacggtagccacatcgcccacgatcggcacgtcgggctgacggttcttgccgatttcagccgggtcgatgtcaatgtgaatcacgcgggcggtcggtgcgaaggcgtcgagcttgccggtcacgcggtcgtcgaaacgtgcaccgatggccacaagcaggtcagcgcgctgcacggcgccggttgcggcaatcgtaccgtgcatgcctagcatgccgaggttcttcgggtcggagtcgggaatgatgccgcgtgcgggcagggtcgtgaccacgggagcgccggtcaggtcggccagagccttgacctgtgcgccggcgttggagcgggcggcgccgccacccacatacagcaccgggcggtacgactgagagaacagcttcgccgcgtcggacagcacacggccgtgcgccttggtggtggggttgtagccgggcagaatcatgcgctgcggccatgagtagtacatgtcgccggtctgtgcggtcttagtcagatccacgaccaccgggccggggcggccggtgttggcgatgtagtacgcctcggaaagcacgcgaggaatgtcctgcgcgcgggtcacgaggaaggagtgcttggacaccgggtaggtgatgcccacgatatccgcctcctggaaggcatcagtgccgatggcttgcacgcccacctgaccggtaatcacgaccatgggcacggagtccatgttcgcgtccgcaatggccgtgaccacgtttgtggcacccgggccggaagtcacgatgcacacgcccaccttgccagtggccagtgcgtagccttcggcggcgtggccggcggcctgctcgtggcgcataagcacgaagcggaacttcgtgttgtctttgatctcgtggtagacgggcagaatcgcgccgccaggaatgccgaagacgtcctcgacgccgaggtcctccagcgaacgaatcagcgcctgggcgccagtcatcttctcgccatcgacgatggtctgcttatcgggggccgtgttgattttcggtacaccgctgaatgcctgcaaaggcgtgggtaaagccatgattcctctcacctcataggttttgtcgcgaacctgcccgaccttgggatggggccgggtgcccgcgtgtctgattccagtcgcttccccgagacttgtggccccggcgcgactcgtcgctcatgttggtattagtctattcgcaaatccgacagcgggcttacttagtccgcgtcttgaacgagtccagtgacttccagcccgcttcggcggccgccagctgcgccttacgcttgctggagcccttaccgatgccgatgatgtcgccgttctcgcccaatgagacgcgcgcggtgaagatctgcgcgtattccgggccggagacctccatatggtagacaggctcctccttgccgaggccgtgcgccttgacggtcagcgaggtcttccagtcaagtgccgggccctcggtggccacttcggcgagcgtgtcgtcaataagccggtgaatcaccttgcgtgcctcgtcgatgccgtgttccaggaaggtcgcgccgatgagcgattccacgatgtcgcataggatggagttcttctccgcgccgccctgctcggcttctccgtgacccagcagaatgtaggggcccaccttgagcttggttttggcgatggcgctcagcgcgtcttcggagacggccttggcgcgcatcttggccagttgcccctcggtcatatccgggtgaatggtgaacagcgtttcagtggagaccagttcgagcaccgcgtctcccaggaattcgaggcgttcgtaattggccacgccggggtgctcatgcgagaaggaacggtgggtgagtgcctgcacgagcagatccgggctgagagtggtgcccaacgcttcaagaagctcgttggccggcgtcggctgctgtggggtttcattactcatgattgttgtatggtccttcacgcgatggtgatgtgttgtgatgtgttgtgttgtttgcgatgcgatggtgtacgcaatggtgcacttatgcgaagaccccgccacccgtcgatggcagggccttcattcaagccgttatcgcaggactcacttggtgtgagccggctggatggcggagcggtaggtgcggccgcggtagttaccgcagctcgggcaagccatgtgcggcagggccggagcgccacagttcgggcagttcacggtcgcagcagcggtggccttccagttcgcgcgacgcgagtgcgtattggcgcgcgaggtcttgtacttaggcagtgccatttgagtatcctctatttcgttcgaacaattgagcttaagcgtccgttatcttaacgcacggctcgtacaaacttcgttcaggcgcgcgtcactcggcctgctcgccgttctgctcggcctcgagctgggctttgagccccgccaatccggcaaaacggatatccgtcacatcgtgatgatggtcgggatcctcgttcagatcggcaccgcactgcgagcacagacccctgcaatccggtcggcacagtggttgcaacggcagcgattcgaccagcgtgtcgcggatcatcgcctcgatgtccgcgaatgcgccgttctccagcagcggatacgtgtcttccgactcgtcctcgccggcgatgatgtcgatttcgtcgtccttcttgttcttgccgcccttgccgttggccttgtcctgacccgactcgtacgggaagaacaccgtcacatcaaccggccagtcctcgtcaatcggcttcaggcagcgcgtgcactcgctgacgaatggcgcgaccaggcggccggtgaagatcaggccgtccacaatcgaatcgaactgcccgctcacgtgtacgggctcaccttccttgatgccgacaatgctgtcgccaatgccggaaggtgccgggaaatcggcgtcaatcggcttggattgaccggcgcgcgaagcaatctgcgctaccggaatggcccacggggaatcttcaactcgtgccatggtatgttcttggtgcctttcgtatgttggctggagttattcgttactggcgttattcgcgttactgatgttgccggcgttgctggcgttactgggcttcgggatagtcgttcagcgtcaggtgcggcatctgttcgcgggccgcgcgctggcgctcttccagcacgttaagaccggcctgcacatcctgactgagtttgccgagctgatgggacagcccttccatcaccgtagtgcagtactggtccgcgccttgggtcagatggtcggctttggtctgtgcctggtcaagaatcgcgcgcgctttctgccgtgcaagctcggtgacgttctcttggccggccaggaactgtgcctgttcgttggcgtccttgatcatgttggctgcgcggctttgtgcggaggcgacgatggcgttggactgggtctgtgccgattccagacggcgctcggcctcgcgcatgagggcggaggcgcgctccaactgcaccggcagcattttcttcaactcggaaagctggtcggtgaattcgtctcggtcaaccttcaccatgccgggggcgaatatgctggacttcgcttcgcccagtgccgtctcgagctggtcgatgatgtcatacaccgtggtgaattcctcgcggctcttgaccgtggccgggtcgtcgtccgtggtttctcgcaggtcgggcatttcgttcatgaacgaggggcgaatgccggcggcctgagcggtctgagcctgtgcccgggtctgctgagctgcttgggcctgcgctttggcctgcatttgtgccggagtaggggtaggcgcggcgggcggcgatccggcgagaacatcggcctcttcggtgggtgccggcgcggcttgcgtagacgcgggcggttccggggcggacggctccggagtggacgatgcggcgtccgcattcggtttggtcagatcgacgtatccagtagggtggtcatcgctcatagtcattagtgcatcagtccttccgctgacgttcctcggccagggcatcggccagcatcggcacgacgcaatcgggcaccatgccggtcacgtcgcctccatggcgggccacgtccttgacgatggaactggagatgtgttcaagaatcggatcggccggcaaaaacagggtttcgatgccagcgagcttgcgattgaccagcgccatgccgagctcggcttcatagtcgccgttctggcgcagacccttgatgataacggtggcgccgaccttcttgcagtagtcggtgatcaggccgtcggtggaagaaacggtgacgttcttgcaaccggctttgtcaagggcgcggcggatcacgtcgactctggtggcttcggaaaacatcggtgttttcgcggcgttgacggccaccaccacatgcacctcgtcgaaaaaccgcgccgagcgctcgattacatccaagtgtccggcggtaacggggtcatacgagccggggcatactgcgatagtcatgctttatagcctaccgctagtggtgtgcttcgtgctgccgagcgtgcattgttgtcgcgtcggcgtatgaggcagtgcgtgcggtgccgtatgtggcgtcggtgtggcgtcgtgtgcggcattgtatgtggcattgtatgtggcggggtggcgtgatgcgcgacatgggtgtgtggaggtgtgcggattacgcgccaatgggtttcgcgggtaacgacgggaatctatgatggagtgcagtcgaatcgttgaatgcgaggaaagaagtgcaccatgacttttgccgatctgttcaccaatgacgccgaaccgctgcgcaacccggaccaaggtgccggcacgtcggtgctggagcgtccggagaccaaggagtcgccggttcgtgacgatggtggcgacgccgatcgttttgcgcactacgtatctaaggaccgtatcgccgaatcacgcgcgaccggccgcccggtggtggccctgtgcggtaaggtttgggtccccaagcacgacccgtccaagtacccggtttgccccgactgcaagcggatttacgaggaaatgacgcgctaaaggtggtacttggctcccctcagcgaggggagccaaaatggtcaccgagccgaaatctcgtcgatgagcttgagctcctcgtcgctgaagtgggtgttcttcagtgcgccgatgttgtcgagaatctgctgcggcttggaggctccggtcagcacggaggtcactttgccgtcgtgcagcagccatgccaggctcatctcggccagcgtctggccgcgttcggcggccagattgttcagatccatgacctgcttgtgcagtttctcggtcagagcggaatcgttgaggaatcgcggatcgtgagccatgcggctgtcggccggaatgccgttgagatagcggttggtcagcaggccctgagccagcgggcagaaggtgataaggcctttgcccagcttgaaggcggtctctttcaggccgttcttttcaacggtgcggtcgaggatgttgtacttgttctggttgatgatgaacggcacgtgcagttctgccagaattgcggcggccttttccatcgtcggaccatcgtagttggacagacccacgtacagggccttgccggagttcacggcctgagccagcgcgcccatcgtctcctcaagcggggtttccggatccgggtggtggtggtagaagatgtccacataatccaagcccaagcgttccagcgactggtcgaggctggcgagcaggtacttgcggctgccgaggtcgccataggggcctgtccacatttcatagccggccttggtggagatgacgagttcgtcgcggtgatgcttgaagtacttggagagcagcagtccgcagttcttctcggcctggccgggttcggggccgtagttgttggctaggtcgaagtgggtgatgccgttgtcgaaggcggtgaagaccagggacttcatctggtcgaatggcgtgatgtcgccgaagttgtgccagaagccaagtgagacggccggcaacttgaggccggaggtgccggcacggttgtaggtcatcgtgtcgtaacggtgcgggttgggggcatagatggcggttggctcgaacattgagtctccttacaatgtcattcttgttcttacgaatgcttacctgcgatgggcaaaccgacgccgattgagcggtattcgtaagtgttcttggatactatggttccagttcaagtgaacttgaatgcaaacggctgcgacgcttcggcgtgttgccgcagtaaggagtcatgatgtcctacaccattcgtcaggtggccacgcagttccatatgcagccctctacgctgcgctattacgaggatcagggattgctgaccaacgtggagcgcaccgaaaccggccagcgcatatacgaagactgccatatcgaccgtctgcgcgcgatttgctgcttcaagaacgccggcatgaccattgacgatcttaaaaagttcttcgtgtatgagtccaatgagcccgagcatatcgatgaaatccttgatctgctggaatctcgccgcgaatccttggacgagcagcgccgagccctcaacgaggcggccatgcacgtgcagcgcaagctccattactatggcgacatcaagcgtgccatcgacgccggtgaagactggccggattggcgcgagtacaaaaaccgcgcctattccattgaatgttgagaccatcgaatgttgagaccatcgaatgttgaggccatcgagtgctgagctggatgccggctgggcactaagaccgatgcgcgtcgatcgtgggcgcgtctatccgagtaaggccttgctcggcagtgcgcggtcgagcagccagacaacgagcgatatcacgaagaacgctatggccagcttgccacagctaatgccgaacccttgccagccgagtgcgtcgaggttgatgaagtcgtacggatacggactgccgccggccgccggtccggaccccggccaaatcgccgcacgggccagcacgaagaccaagtatgcagggaagtacgccagccacgagaacatgtaatgccagcggaaacgccggtgcgggtcgaatagcacgaaatcgataaccgccataatcggggcgattttgtgcagcatcgtattggtcatgatgccaataacctgtggcacgtatgccgggtcgtccggaggcatcaggaagaacgccaccagtgcggtgactatggcgtacacagtcaggcaccccttaagccatgcaggcggctgaatacctttgagcagtgtggccgcgccggaccacagcatcacgatgcccagcacgaaaccggtctggaacgtgaaatacacccagaactgcggtttggaccatgcctcatatgtgcccacgaagcagaaaccggcgatcgcaaagcgccacaacgccacgatgaatctcatgcatcgagtctaccgcttcgccagtgggccgtatggtgcggctggcgtattggctggtcgtgatgattatggtcggtgtgaccgaccgccatagtgccgatgaatatgacgatactgaacccggcaatatcgaatctggcgatacgagaataagacgagcccttcccgcacggctttgcccggactacacttaggtgcaacttcaccacttatgtaggaaaggccttgcaatggtcgattattcgccggctctgatgaccgacatgtatgaatacacgatgctcgacgccgctctgaaagacggtaccgccgaccgcaagtgcgtgttcgaggtgttcacgcgtcacttgcccgaaggccgtcgctatggcgtggtggccggcaccggccgcattctggatgcgctggaacatttccacttggatgaagcggatctgaagttcctggccgaccgtcacgtggtaagccccgagaccattaagtggctggagaacttccacttttccggtacgattcgcggttaccgcgaaggtgagatgttcttcccgaactccccgattttgcaggtcgaaggcacgttcggcgaatgcacgctactggagacgttgattctatccgtgctgaactacgattccgcagtggcctccgccgcctcacgtatggcgtcggcagccaaggatcgtccttgcatggatatgggcggacgccgcactaacgagtgggccgccgtggccgccgctcgagctgccgtagtgggcggattcaagggtaccgccaatctgctggccgcccagctgtatggtctgaaggccatcggcaccgccgcgcattgcttcacgttggtgcatgattccgagcgtgacgcctttgaatcgcagatcgaggcattgggcaagaacaccacgctgctggtggacacctacaacatcgaggaagccgtgaaaaccgccgtcgaagtggccggtcccgaactgggtggcgtgcgcatcgactccggcgacttggccgccatggcccagcgtgtgcgcaaccagctggacgccctgggtgccacgaacaccaccattaccgtgaccaacgatttggatgagtacgcgctcgccgcattgcagaccgcgccggtcgactcctatggcgtgggcaccatgctggtcaccggctccggcgctcccacttgtgcgatggtgtacaagctcaccgagcgtgaaggcgctgacggcacgatggttccggtcatgaagaagtccaaggataaggccacagtgcccggtcgcaagttggcattccgctcctacgaatacgcgctagccgaagccgaacacgtgatttccggctcggaagagaagctggccggtttcacgcccgaaccgacgtggaagaacctgctggtcgatttcgtggaccacggccatatcgatgcgcagtggcagggccatgacgctatcatggccgcccacgactaccacgccaaggcgttgtccgaactgcccatcaccgcgcagagcctcatgaagggcgagccagtgattcctacggagactcaggttctctgacgagaactttcgtctccataggaatccgtcgcagcatagctgctccccttacctacggacagcccactgggctgtccgcttaacggttcgaccacagagaccaaagtcctctggccgtatctcactggccgcatccctctggttacattggctactcttccctctggatgagtgaaactctcaatggtgataacgcggcgggcaacgatgacgtatcagagcggcgcgatgtagttcgatgatggttgacgagttgctatccaggcatagagcggatggcgtatgctggggcgcatggttgaaatcaaagacatgcttggcaatcaccaaataattcgtgccgacggccgcaaggtcgacgaactgcgccctgtgcgcatcacccgccacttcaccgacgcccccgaaggctccgtgctcatcgaatgcggtaacacgcgcgtgatgtgcaccgccacttttactcccggtgtgccgcgttggcgcaaggactccggcctcggctgggtcaccgccgaatactcgatgctgccgcgtgccaccgccgaacgcaccgaccgtgaatccgtacgtggcaaaatcggtggccgtacccacgaaatcagccgactgattggccgctgcctgcgtggcgtcatcgatatgaaggcgctcggcgaaaatcagattcagcttgactgcgatgtgcttcaggccgatggcggcactcgcacggcttccgtaaccggtgcgtacgtggctttggtcgacgcagttaattgggcggagaagcaccgccatatcaagtccgccagccgcgtgcttaaggactatgtgtccgccgtatcggtgggtgtgatcaacggcactcctatgcttgacctgccatacattgaagacagtcaggccatgaccgacatgaacgtggccatgaccggttccggcaccttcatcgagattcagggcaccgcggaacaccgtccgttcaaccgtgccgaactcggcaccctgcttgacttggccgaaaagggcaacaaggaactgcaagccgcccagcgtgccgctctgtccctagactaagccagctcccctgacaaggggagccttcttaaaggagaacctcatgcaaatcgtcgtcgcaacccataacgaaggcaagcttgtggaaatccgccgcattctcgaagaggatcttggcgcggatgccgaaaacatcgaactggtgtccgctggcagccttcacctgccggatccggtggaaactggtgtcaccttccaggagaacgcgctactcaaggcccgcgctgtggccatccgtaccggtctgcccgctgtcgcggatgattcaggtctcatcgtcgatgtgatgggtaacgctccgggcattctgtctgctcgctgggcgggtgctcacggccacgacaaggccaataatgcgctgctgctcgcccaaatcgaagatattccggatgacaagcgtaccgcgcgcttccgttgcgccgccgcgctggtggtcccggacaccgagaccggtgccgacgtgaccggtggagtggctgccgacggcatcaccgttcacaccacggctgccgctgggagccctgccccggtgcatgctcgatacgccatcaagtcggagacagtggagctcggcgacatgccgggtcgcatcatccgcgaggctcgtggcgaacacggtttcggttacgatccgctgtttgtcccggacgatcagcctgccggtcgcgtcagcactgagcctgaccatgaaggcgagccgctgaccagcgccgagatgactccggccgagaagaatgcgatttcccaccgaggcaaggcgctgaaagccttggtccccgccatcgaggccctgctgcactaagtcgtctaggctgtctagctgcactgagccgcgactaagccacagttgagtcgcggctcagcactcagcccccgaatcgggcgagtgtctagcaagcgcctatgacctagcaagggcgatacgaaagaaggccggcgcttagtgcgtcggccttcttgatgaacaagagccacccgatagaatcgaactaccgaccttcccacgaacgagggggatgctctaccactgagctaaggtggcgtggcttcaagagccaagtagagaatatagcactgcgtttgattcactgcaagccggacattcatcatctttgggccatttgttctttggaccatcgtggcggcaatagtgcgaacgatgtgcacacctcatctgctcggccgccattcgtcgtgtgcgcgctatgctagcatggtgagcctgattgactcggaggcaaagggaagcatgcgtgattttgtgctggtgaagttgacagacgaggagttcgatgatttctccgccaggcatccacaaggcaatttccaacaaacctcggcgatgggacgccttcgcgccgcgcaggggatcgacgtcgaatatttggccctcaaggagggcgagaagatcgtcgcggcggcactgttcgaaactcaccgctctcgattctctacatttgcggtcatccatgatggcccgatgtgcgactatcacgacaccgaagcattgaccttcttcatggatgcgctgaaacgccatgccaaggcaaagggtgcttcacagctggaaatcacccctgaatccccgtatcggcttcgcgacaccaatggagcttctttgccggatgaccagaatggcgctcccgacaataagctgatagaacagctcgaggcgatcggcttcactcatggcggtttcaccgtgggctacacggcggttccgcgttggcgctacctcaaggatctgaccggcattaccgatgagaaaagtctgctgaagtcctatgacaagcgcacccagtggagcgtgaagcgtgcccaatcgatgggtgtgcacgtgcgtgagctgtcggacgacgagctgggggtattcgcacgaatcgagcagcaaaccgctgaacgccgtagcttcgaataccgtggcgaagcatatttccaccgtttcaaggaagcgttcggcagcaaagcgcattttatggttgccgagatccacatcgacgaatacgtagcggacatgacgtccaagcgtgaagcgctttcggccaaggtggtggcattgaccgccaaaaacgccgaacaccccaccaccaaaaccgaacgtcagctgggggaggagacccgcaatctggcggcagccgaaaagcgcctgaacgaggcggccgagttcgccaaagacggggatgtactgccggctgcggcatcactattcgtggagcatccgcgcgaggtcatctacctgttctccggtagcgtcgagcagtacaagcccttctacgcctccgcgctgattcagcatgacgcgatgctgcatttctgcgtggaacacgggctgtctcgctacaacttctacggcatcgacggcgtctttgatgatcccgatgacgaggggcgtggtgtactggagttcaagcagggcttcaacggatatgtcgaggaacttccgggcgagttcgtgctgccggtcaaaccggtcgcctatgccatgaagcaatttgcgcacaagctgctgtcgcggtaaacggacgcagcacacaggccattccagagcccagagtaacgatcagagtaacgacaagtaagaaggttcgattatgacgcaatccgatgcaggcgtcgcctcgctcacccctaccaagatcactcctgccgagctggatgcgttctccgcagctcaagtgcaaggtagtttccagcagacctcgcagatggccgccatgggtgcgttcaacggtccggtggactatgtgggtgtcaagcgcggtgacaagctgattgccgcctgctacgtggtgtacacgcggtcccgtttcggtttggaaggctcggtctggtgcggaccgctgtgcgattatgacaatccacaggtggttgaggcgatgaccgaagccctgcgtcgttcggccaaggcccatcacgccatcagcgtatcctgctggccggccgcagtctaccgtctgcatgatctggacggcaagccgaccagcgacccggacaccacgatgatggacaacatggcccgcttcggttggaaacatggcggtttcaccgtgggctacgaatccgtggtgaaccgctggaacttcgtcaaggggcttgacggcattcatgacgagaaggaactgctggcctcgttctccaagtaccgccgtaagaacatccgcatcgcccaggattccggtctgcgcgtgcgccgactggaacgcggcgaactgagcactttcgtcaagctgtgcgatatgagcgccgcacgtcaaggcttcaagagccgtgatctggcctactatgagcgtctgttcgataccttcggcgacctgatcgagttcaaggtggtcgaaacccatttcgacgaatatctggacaccctgcaatccaagctgaatgcggcctccaaagacaagcgcaacctcgaacgcctgctccagcgcgcgcaacagcagccggaaggcacggccaagaagggtgcttccgacccggcaacgctggaaaagcgcatcgccaccgcagacaagaagattgcggcgctggaaaagaccatcggcgaagtcaatggcatcatcgcttcggacggcccggtcattccggtggaagccggcgtctacttctggcatccgaacgaggtcgtctgcctgtccagcggcgaggacgatcgtttcatggattactacccgtcttccctaatccacttcgaggcgatgcttgactgcatcgcccgtggcgtggagcgcttcaacttctacggcatttccggtattttcgacgccaacgatccttcctacggcgtctggcagttcaagactcgcttcggcggattcgtggaagagcttccgggcaagttcacgctgccggtggacggactgcgcttcggtgtatccgaagcagcacacaagctgctgcatcgctgacaaacagtggcgagcacggacacagaaataaggcacaggtgacgacgagatgagcgcgactgcgaatcgaacagatacgacgtatacgtttggcgtgattacgcccgaagagctcgaccggctttccgaagccacaagccagggcagcttccagcaatggtccgggcaggtccgtcttgccaagattcgtgggcatgaagccgaatgcgttggcgtgtgcgacgcatccggcaatctggtaaccggctgcgtgattctgtacctcaatggtcgtttcggtgcagatggctccgtatatttcggccccatcggcattagcgatgatccggctctgctgcgggccataaccgaggcgattcgcgaatcagcccgtcgccaccatgctgtttccgtagcatgctggcctaacgtcgcctaccgtctgtattcctcggacgggcagcccgacggcgagccgaacgatgcactactggccggattcgccgatgccggctggatgcatggcggattccataccggttatgacgtggtctgccagtggatgtacgtcaaggatctcaccggcatcaccaacggcaaggaactgctggcgtcattcggcaaacgtgctcagtggagtgtcaagcgggcgcagtcgatgggtgtgcacgttcgcgaaatcggccccgacgagttcgacgtgttcgccgatatcgaacggcggaccggtgaacgccgtgggttcgcgacgcgtggtgcagactatttccgccagttcaagcaggcgtatggcgcagatgcgcatttcatgctcgcggaaatccacatcgccgaatatgtggcggatatgaccgccaagcgcgaggcgttgcaggccaaggtagctcgattgcaggcgaaatacgatgaacgtccgaccacgcgtatcgaacgtcagctgggggaggaatcacgcaatctcgcggccgccgacaagcgtctggctgaggtggagggatatgccaggaagggcgatgtgctgccggcagcggcttcaatgttcgtcagtcaccccaatgaggtggtctatcagtattccggttcgttggaggagtacaagccgttctacgcctcggcgctgattcagtacgaagcaatgctgcatctatgtgtggagaagggcgtgccccgctacaacttctacggcatttccggcgtgttcgacgatccgaacgacgagggccgcggcgtgctggaattcaagcagggctttaacggctacgtcgagcagatggtaggaaaattcacgttgccggtggataagttccgcttcggcgtgagcaatctggcgcacaagctgctgcgccggtagcaactggcggtcgggggacgagcctatgtgggctgcgtctcgtctgaccgtgcacccgccgtgtgcctacttgcgcatttgctcacacgcccatcagcgcgtgagccacagccatcatcaccagtgaaatcatcgcggtgattgccagcgagaagccggccagtttggcgttgccgagtactttgtcggtgaacagcgtggagaaaatggcgatcggagccaacgcgcagatcaccatcacggcgcgaatcgaagccgagaacggcagcaggaaccacgcgatcaacgcgaaggcgacgctgaacggtatacgccaagcgatgacggccatgacttctttcacgtcatgcttggattggggcaggtccatgagcatgcccaccatcagcatcgacaccagcgcgttggcgccgctcaatggctgggttatagagacgatccaatcgggaatcttcacgttggcgacggtcaacacgatcatgagcagatacgtgtcgaacggcaccgagccgaagaagctcttgccgatggtgcgcagcaatgcgcggcgggcaagccgtttggcgtcgcgatccttgggcttttcgtacggtagggtgggagccgaaccggcgtgttgttcggcaagtgttttgccgggctgaatatgcagcagttgctgggtgagcacattggtgccggcggccaccatcacgcagttgccgatatcgaacatcgcagccggcaccaccgcgcccgcaccccagaatgactggacgaccgggaaagaaaaacagccgagattgaagccggcaccgttgagcatcaggaaggcgcggtcggtcacattgcgcttgcgggtggccagaaagatgaacacgaccgggataaaagcaaacaggaatgcgaataccgaaataagcagcagcgagatgtcatgcggattggtggcgaacgagtatacgatggcaccgggcagcacgatgttgaattccgcggtttgcagcacgcgataatccttctgcccgaacaggccgaaccgcttgaacagatagccggcgaggatgatcagcaacagaccaaccggcgtaagaatggcggacatacacttctctccttgactcacacaggctcagacccgcaatgctgtggcccattatatttgccgccttggcattgccatatgtagaggtgtccgcaagggcttgcagctgccgcgcgcatatacgaaaagcctcccggaagcgttggcaatccaatgcttccaagaggctcaagccggtgcgcgagatgggacttgaacccacacgtcaaagacacaggaacctaaatcctgcgcgtctaccaattccgccactcgcgcgtgcatatccgcgtttccacaggtgtgggagatatgcaaaaccctaggccggacagccattacagaccgaccagcctagggcatccgagccacttgtcagaatcgaactgacgacctgctcattacgagtgagccgctctaccgactgagctaaagtggcttggttcgcggaaggcatttcgccagccgcgcacaagaagttaagtataagacatcccagcgaaaagtccaatcggcggattggcggttgtgtcgcgaccgctcagtcgaagatgacggttgcgccgcgccacgaactgttcgataatgcaaacgatggcaatccgacatcgctgactcattttgttctgttcatgtccgaatttgtgagtattctgtttggtgatacggagcgcatccgagccgtgtgcaagggcgctccagtcactgatgaaaggaatggaatcctatggccatcaatccgcccgttgacgccacccagacccctgagtgggctgccctgcagaagcactatgacgagcttcaggtcgaaggcgtgagcctcaagaagtggttcgccgaggacgccgagcgcgtcgagaagctgtccttcgacgccggcgacctgcacttcgatctgtccaagaacctgatcaagccggaaaccctccagctgttcgccaaccttgccaaggccgtcaagctcgatgagcgcaccaaggctatgtacaccggcgtgcacatcaacaacaccgaagaccgcgccgtgctgcacaccgcgctgcgccgcccggtcgaagacgaaggcaagtacatcgttgacggtcaggacaccgtcaaggacgtgcgcgagacactcgacaagatctacgctttcgctgacgacgtgcgttccggcaagtggaccggtgtgaccggccgcaagatcgagaccgtggtcaacatcggcatcggcggctccgacctgggccccgtcatggtgtacgaagctctgaagccgtacgctgacgctggcatctccgcccgctacatctccaacatcgacccgaacgacctggccgagaagaccaagggcctcgacccggagaccaccctgttcatcatcgtctccaagaccttcaccaccctggagaccctgaccaacgctcgcgaagcccgcacctggctgctcgaagagctcaccgccaacggcgccatcgccgagggcgacgaggctcagaaggccgaagccatcaagaagcacttcgtggccgtctccaccaacctggagaaggtcgaggagttcggcatcgacccgaacaacgcgttcggcttctggaactgggttggcggccgttactccgtcgattccgccgtcggcacctccctggccgtgatcttcggcccggcccgtttcgaggagttcctgcacggcttccacgagatcgacgagtacttcgccaacaccccgttcgagaagaacgtcgtggtgctgctcggcatgctgaacgtctggtaccgcaacttcttcaaggttgcttcccacgccgtgctgccgtacgaccagtacctgcaccgcttcccggcttacctgcagcagctgaccatggagtccaacggcaagtccgtgcgttgggacggcacccccgtcacctccgagaccggcgagatcttctggggcgagcctggcaccaacggccagcacgccttctaccagctgattcaccagggcacccagctcattccggccgacttcatcgcgttcgtcaacaccccgaacccgaccaaggacggcgaccaggacgtgcacgagctgttcctgggcaactacttcgctcagaccaaggctctggcattcggcaagaccgctgacgaggttcgcgccgagggtactccggaagagatcgttccggcccgcgtgttctccggcaaccgtccgaccacctccatcttcggtgtggctctgaccccgttcgcactcggcgagctcatcgccctgtacgagcacatcaccttcgtggaaggcaccgtctggggcctcgactcctacgaccagtggggcgtcgagctcggcaagcagcttgccaagcagatcaccccggccatctcccaggacgacgacgccctcgccgcccaggacgcctccacccagagcctgatcaagttctaccgcgcaaatcgcgaattctgattcgctttgctcggtcagaattcgtgattcgcgcgaccgcggctgtgctgtctggtgggcagtctggcgactgcccacgtcgcgaattctgattcgctttgctcggtcagaattcgtgattcgcgcgaccgcggctgtgctgtctggtgggcagtctggcgactgcccacgtcgcgaattctgattcgtttttctagctcccctcaatactgaggggagctgtcagcgaagctgactgagagggagttatggaacgctccgtatgctccccctcaactatgactgttgccggcggcgggactactggaataatcaccgtccatcggactctcacctccttcaagccgtgcgctgaaacgccaaatcaataccatcgtcggtatccatgcgaccagcaggaggggcggaaagtattcgaatccgccatccgtgctgcctcggccaaactgatgcgttaataacggagagagacgacgacacgccgatactgtccgcaagaatccgtacaattgacgattgctgtgtcgagaagtgggccgccgcataagcccgcgtctccgtgggtccagtccgaacggccgcaaggcttggcttttggcggatcggcaggcttcccaagggcaaactcgagggataacgagaacaggccaacgcgcgcgatgcgcaatcgcgtggatggccccagatctgtggctgatatgcggcagcactgaaggaaaacaatggttaacgctgttgaggcttttgacgccaagcacatgaagccggccgaggaaatcccggccttccgtcccggcgacaccgtcgacgtgaacgtgaagatccaggaaggcaacaactcccgtatccagaccttcaccggcgtggtgatcgctcgtaagggcgctggcgtgcgtgagaccttcgtggtccgcaagatcagcttcggcactggtgtggagcgtcgcttcccggtgcactccccgtccatcgactccatcaagctcgtgcgtaagggccgtgtgcgccgcgccaagctgtactacctgcgcgctctgcgcggtaaggccgctcgtattgccgagcgccgcgacaactccgctaagtgagtcgattcgcgggtgcaatcgtgagcctgatgatgcaggcacgcgaataaaccgtgaaattcagcccggaaccgtttcggtttcgggctgttttcgtattttccacgtatgatggacgggcgccggcacccctcatatccggcagcatgaatcgcgaggagatggtatgcaggacgatcaggataacggcgaattcccggtttccgacaatccggagagcaaccagacctcgtatgatgacgaggccgatgcccgcgattcccgcacgttccaagtcgctgaccacggcatcgccctgtccccggttcccccggcaccggcgcgcccggcgcacgccgcttcttccgctggcgcgggtgcagccgctggcgtgaatgccgcggcagcatcatcgtcagatgatgaccacttcaccctacgcgactttttcctgtggtgcggcgttcccgtgcttatcgtgctgctgattcgcattttcgccgtcggcttttacgagattccttcgcgctcgatgatggacaccatggtgcccggcgatcgcgtggtcaccagcaagctcactcccaagatcttcgatttgcagcgcggcgacgtcgtggtattcaaagatcccaacaactggttgaacgaggagcagagcagcgctcccggtggcgggtacctcatcaagcgactgatcggcctgcccggtgacgtggtcgaatgcaagggcgcgggccagccggtgaccatcaacggcgtggccatcaatgagacctcctacattcgccccggcgtggacccgagcgccttcccgttctcggtaaccgtgaccgagggccacgtgttcgtcatgggcgacaatcgcgccaattccgccgactcccgctatcatcaggatgacggcgatcgcggcttggttcccatctccgatgtggtcggagtcggaatcgcgaaatactggccgcttgaccggcttggtgcgattgatgaccaccacgaagtcttcaaggacgtgcctgacgcttccggctcgaattcctgagtcttttttgaaccgtgtgagtctttgaactgattgagttccgggccgtctgaatcctgaaccatatgaatcctggaccgtctgaatcctggaccgtctgaatcctaaccattgtgagacgatgggagccgcgcatgattaccccaacacttgacttggaacgcagccttgcggcccagggctatgaccttattactggattcgatgaagtcggccgcggcgcgctcgccggtccggtgatggtcgggtgcgccgccatctgggcccgtgatttggagccgttgaatggcgatgatgccgtcgaactgtccgggcggacctacctcggcgtgccggacggcgtggccgattccaaaatgctcaccgaacataggcgcgaggcgattttcgacgaactgcgcgactggtgcgcggcctacgccgtaggccaggccagcaacaccgagatcgacgaatggggcatcacctacgcgcttggcgtggccgccctgcgcgcgctcagccaagtcgaacgcgaacttggcttacggcttggaggggaatcgacgacaaaaaaggcttcgggggagtctgcgggggagattgtggaaggtcgtccgggaggctccgtaggggaatccattggaaattgtgggggaagcattcgcgccctgcccaaagtcgccggaattctcgacgggccgagcgattacatcaccaaggcgctcaacacgttcgacgcgccggacgtgccgattccagccgatataacgaccaaagtcaaaggcgaccagcattgcgccaccgtcgccaccgcggcggtcatcgccaaagtgacccgagatcggctgatggtcgacctcgcgcaaagcaacccacgttacgccgcctacgaatgggctcataacaagggctatggttccgccgcacaccgtaccgccatcgccgagcacgggccgactccgctccatcgtgtctcatggcacctgacctgagccgcgtgcgacacgacagtgtgagcgctaacgcaaaactgttgtggacgcgctaaagtcagtattgattaaggtacaagactggccgtgcatggatgccggccgccagcggggaggttaggcaatatggtgaccagccgcaagccaagcaaacgtccgtccatgttcgaagtggccaagctcgccggagtcagccaccaaaccgtctcccgtgtgatcaatgactcgccggacgtttccgacgccacccgtgcgcgagtccaggccgccattgaccaactcggctaccgcccctccaactccgcgcgcgcactggcttcccgccgttcgcgcaccatagggctgatcgccggaggcctcaaattcttcggcccgatttcctccatctcctccatcgaatccatggcccgcgagcacggtctgttcatgagcgtgatgatggtccacgaggccttgtgcgcgcaggccgacttcgacaacctgtgcgacaccttcaacgagcagaacgtcgacgccttcatcttcctgaccccgaccgacgtgatgttcgccgccgcctgccgtgcgcgagtcactcagccgcgcgtcatcgtcaccgccacccacggtcaaatgaccgtgcgtgagggattgggccttatctccaccgaaaacaagcgtcgcactgcgctggtcggtatcgaccagtggggtgcaatggccaaagtggtggccttgctgggcgaatacgggcacaaatcggctctgtattttgccggtcccaacgaatggcgcgacgcccacacccgactggatgcgtggcgcaagctcgccgcctcccgatccatcgattcacagatcgtgcgctgccatacgtgggatgcctctgaggcatatgcgcacatgaatcatctcattgatgagtatgggcgtcgaggcgcggcgttgcccaccgcggtcgtcgccgcgaacgacaatcaggccgttggcatcatgcgcgcgttgcatgagcatgggcttcggattccgcaagacatcagcgtggtcggattcgacgacatgtctggcgtggataacatgtacccaccgctgaccaccgtgcatcccgatttcgaggggctcggcgtggccgccatgcgagagacgctgcgcttgctgggggagggcggcgagccgaccttcctgaccacccagcacggcatggggctgattcccgccgaggttcgtgctcggcggtccttgggaccggctcctcggcggtaaattggccctgttatcaaaccgttatgatgcgtgacacggtgtaagttgtgtcgaatgcaggttatcggtacaatgttttttggaaattgtgagcgctaacaccctccccaaggaaggggataacaacgccggcgctccaaggcaaaggaaagatatggcagcaaccgacaacgcggccgagcaggtcgcccacatcgccgagaagattcgcgctggcaagaccacgctgggtatcgaattcggctccacccgcatcaaggccgtcctcatcgacgacaacttccagaccatcgcctccggcgactacagctgggcttcccatctggaagatggtctgtggagctacaccaccgaggagatctggggcggtttgcagtccgcttacgcctccatggccaacgacgtcgagaccgcctatggcgagaaactcacgcacgtcggccacatcggcttctccgccatgatgcacggttacctcgcattcgacgaggccggcgaactgctggtgccgttccgcacctggcagaacaccaacacctccgaggctcacaagaagctctccgagctgttccagtacaacatccccgagcgttggtccatcgctcacctgtaccaggccgtgctcaacaaggaagagcacgtctccaaggtggcttacttcaccacactcgccggttacgtgcactggaagctcaccggtaagaaggtcctcggcgtgggcgatgcctccggcatgttcccgattgacccgaccactcacacttacgaaaccgcattcattgagaagttcgacgctctacctgaggtcgcagcccagccgtggaagctggagaacctgcttcctgagccgcttgtggccggcactccggctggcgagctgaccgaggaaggcgccaagctgctcgatccgtccggcgccctgaagcccggcatcgtgctcgccccgcctgagggcgacgccggtactggcatggtagccaccaactccgtgcgcgtacgcactggtaacgtctccgccggcacctccatcttcgccatggtggttctggagcacaagcttaaggccctccaccctgaggttgacttggtcaccaccccggccggcgatctggccggtatgagccacgccaacaacttcacctccgacctcaacgcttgggtcggcctgttcggccagttcgccaaggctatcggccagccggttgacgcaggtatgctgtacggcaccctgttccgcgcggccatcgccgacgacgtggacgccaactgcggcggcctgctgaactacccgttccgttccggcgaattcctggccggtctgcctgaaggtcgcccgctgttcgcccgcagccccgaagccaacatgaccctcggcaacttcatgcgcgcccagctgttctccgcgttctccccggtcaagatcggcatggacgtgatgaccaagcaggagcgcgtgcaggtcgactctctcgtgggccacggcggcatcttcgccactccgaaggtggctcagaagattctcgctgctgccttcaacaccccgatcaaggtcatgtccaccgccgccgaaggtggcgcctggggcatggccgtgctcgccaactacctgtggaacaccaacgaggatcacagcaacctcgctgacttccttgacggttgcgtgttcaaggacgcccagtccaccactgagaagccggtggcttccgatgtggttggtttcgaggacttcttcgcccgcttcaccaagggcctgcccatcgagcacgccgccatcgaaaccatcaacctcgaagataagtaagcctttctgacctccctctattgagggaggtcattgagattttgaaaaaacgtccatccatcacagtggaaaggaaaaccaataatggcaactttggctgattacggccccgaggttcgcgccgaggtcaagcaggttcgtgaggtcgtctccaacctgcaccagcagctgatcaagtggaacctggtcgtgtggaccgcgggcaacgtttcccagcgtctgcacaccgccgacctgttcgtcatcaagccctccggcctgcgctacgagtacctgaccccgtcctccatggtcgtgtgcgaccttgacggcaacgtggtcgacggcaccgaagccccgtcctcggacaccgcttcccacgcctacatctaccgcaacatgcccgacgtctacggtgtcgtgcacacccactccacctacgccaccgcttgggctgccactggtcagaacatcccgtgcggcctgacgatgatgggcgacgagttcggcggcccggtgccggttggcccgttccgtctgatcggctccgaggcgatcggcgagggtgtcgtcgagaccctcaagaagtacccgaagtccccggccgtcctcatgcagaaccatggccccttcaccatcggcaaggatgctgaaggcgccgtcaaggccgctgccatgaccgaggaagtcgctcacaccatgtgggccgcccgtcagctcggtgacatcatcgagatcgaccaggccgacatcgataagcttaacgaccgctaccagaacgtctacggccagcactgatctgatggagtgtccgccgcgttacggaaggctcgacgtaccttcgtacgccttcgccttccgcgccttgcggacacacacatcaaatcagcgctgactccgccagcacggtggtgtcttggctcccctctctgaggggagcctcggtcggcgaatgaaacttaaacaaacccccataaacaaagaagtaaaggaagtaaccctatggttatggaaaaccccttcgagggcaaggaaatctggttcggcgttggttcgcaggacctgtacggcgaagaagccctgcgccaggtcgccattcactccgctgaaatggtcgactacctgaacaacaccggcaagattccggccaagatcgtcctcaagcccaccctgaagtcctccgacggtgtcaaggagttcatggtcgaggcttccgccaacccgaacgtcatcggcgtcatcacctggtgccacaccttctccccggccaagatgtggattcgcggcctcgaagtgctgaccaagccgctgctgcagctggccacccagcaccacaaggaaatcccgtgggagaccatcgacatggacttcatgaacctgaaccaggccgcccacggcgaccgtgagttcggttacatcgtctcccgcctcggcatcaagcgcaaggttgtcgtcggccactacaccgatcctgaggtcgccgagaagctcggcacctgggcccgcgcctgcgccggctgggatgcctccaacaacatgaaggtcatgcgctggggcgacaacatgcgtaacgtcgccgtcaccgagggcgacaagaccgaggccgagcgcgtgttcggcgcctccatcaacacttgggccgtcaacgagctcgtcgctgcgtacgacgccgtcaaggacgaccaggtcaaggagatcatcgaggactacaaggccaagtacgacgtcgacccggctctgctggacgccaagtacgactccctgttcatcgccgccaaggaagaggccgcgatggtcaacatgatgcgcgccaacggctgcaccgccggcgtcgacaacttcgaggacctcggcgctctgccgcagctgccgggcgttggcccgcagcgcttcccgtccgagtacggctggggcttctccgctgaaggcgactggaagaccgccgtcctcgtgcgcatcggcgccgtcatgggctacggccttgagggtggcgcctccctcatggaggactactcctacaacttcaccgagggtgacgagctcgacatgggctcccacatgctcgaggtttccccgtccatcggcaccatcgccaagccgaagctggagatccacccgctgggcatcggcggcaaggccgacccggtccgcctggtcttctccggcaagcccgccaaggacgctgtcgtggtctccatgtccgacgttcgcgaacgcttccgcctgctcatggacgtcgtcgacgtcgttgagccgcagggctccctcaaggagcttccgtgcgcccgcgccgtctgggagccgaagccgagcctgaagaccgctgttgagtgctggatcaccgccggtggttctcaccacacctgcatgaccacctccgttggtcgtgaggcttgggaagacttcgcccgcatcgccggtgttgagctcgccgtcatcgacgagaacaccaccgctcgccagttcgagaaggaactggagctgtccgagatgtaccaccgtctcaacaaccagcactgatgactaaatcaatctgctgactgctaccgctgaaaaggggctgttccgggaaaccggagcagcccttttttaggtggtttagatgattcgcattaatccgatgcgcactgaattgaattccgatttatcgaggtatgcgatcaagctgattttgtaatgcagccgtcatggtgcccatattttcgattacattgaatgattggtttacggcatcagcaaatgggcgaaggggacgcgcaaaattaccaagcatacgaataagggacagcatctgtgtcacttccggaggcatggatagcgaagtgcgcaatccatcgaatgtcgctcccatgctgtcaatctggctgttgcgtagagcgccttgtggaaggccctgaatgaagcccacgtattgagacatgacggcataggcgttattccatagttctgacagattatccgatgccttgttgagcgaatcaatgtcaggttgtagttgttctgatagttgtatcgcccatgaggaatagacagatgcattgccgtttgcaggagcaggatgggtacttaatgtctttgagatattttgaaatgatacggcaaattcttgcgcgcccacattaacttgtggtgtaagcttttctatctcattccaggcactcaataaatccggtgtgttgtctcccttaaacttgctcacaactgactctgatgtgccatcagattgtgattgggcagtaatatcctctattactgcgcgaagttctttcacgatttcaaggattctcttttgacgatcttcggcagacattaaacgcaaatcgcccactggtagatactgtcgattatgcgcgatgtcccaaacaggatcacgatcactaattccagtcatgccatctatgctttgcaacatcaatggaagtatacgattcggtccatgttccgtgacccgagtattgaaatccagcagttctttacgacaggcctcactacgcacatatctgggagtaattattggaagaatgatatttgcattaccaatacctcgatcaagtgcctgacgccaatcttcaccccagtttatagaggtcttgtcgacgaataacccgagtgtattgctggtctcgtaattgtattcgtcgataatatcattcacgaattgaagtattgcccccttgaggtggtcattgtctgcatggcagtagcttaaaaacaggttggcatcagtaggggcattggcatgagctgccacattggtgtcggacggccgaataggtaaaactgatggaatcgataatgagtaatgttcagcatccgaagtagctgtctggaatccgtcactgtcccacaatgatgaaattggcagagcccatatgttgttagtgaactgctgcaccttgtctcctgtgtataagacgtagcctcggtggaagcgcttgtcgctgtcgcgcaatgctgcaataccagaaaaatctttgcggtccacggtattgttggacttcatttccaaagcgacaagttgattatcgtgtagcagcacgagatcaacctctttgggtttattgccagtttcccgccagtagaaagcgtcggggtgtatatcggaccattgtatttccggaatgatttgattgacggcgaatgattcaaaaagctcgccaaacagaacgcgatcattatgaaaatctctgccagattgtcgtattgtttcaacgctgaatgacgtgtctactggatgtatttttgcgcgggtaaacagttgcttgccaggtgctgagcgtaggttcggtagggcggagattaggaatcggcgcatgaaaatactgatgtatcgctcaatggtggagggattcgaatgaatagtgtcggatattctttttacattcaaaatcccgccagggactgcaagtaactctttgagtatggaatcagctattgctttatccaatcgctctccgggaagtatggtatcgcccaaaacattatcgatatccgtttttacggaaaaacgtaaatcgctctctgcaataggtatggagggcattgcatacgaggggaaacctcccacagtcatatacctagctagtgtgtccctattggtctctgaatgatagttcgcatttggggtaccgttccacaacaagtcaatgatgctggtatcagtatttttattgatttctctgcgtgttaggggatataaggtgtaacgcagggaacggcgggtaaggggatcctgtccgtctagcccatctcgggtgattgatgctgaaccagtaagaatgaaaaaaggagtagaaccagtttgcttgtcgattactcccttgacggatagaggcaagtcgggaatacgttgagcttcgtcgataatgcacggcgtgggtagcgaatcaacccactcatccaaatgagatgaggcgtactcgaatgtcctcttgtcagcaagcgtctcataatgatagccgtctggcaattctgtctgaacaagcatggttttgccgactgctcgtgctccttccagcaccgctactttgcttggacactgacggaggacttgtgccaacggtcgagttacgtatcgaacattcgatggaatcatgttgataagtttatcacatgctgtataaaaaaatgatattttatgtgataaaaaaataacatccaatgaccttagagcacttcaggtgatgttttccagcaagatgcagccatgtttccagataacacagacgcgccgctgcctggtgcggaaccgttggcatgaggtggcaatctcgattatgctttcgtggtcacgcaaaaaatccgctgttatcggcaactccccacaaacgcatcaaaaatcgcctgcgagcgtggatctaccttgtagagaaactcgggatgccactgcccggcccacaggaagtggcttgccggccggtacagggcctcgatcacgccgtcgggcgcgacggccatgacctcgagtccagcagcaggctcacgaaccgcctgatggtgatagctattcaccgcaatctcagtctgccctgcgaacaatgaagccaggggagtgccgggcaccaaggaaacgttatgtccgaacgcatcgtacggcggattcatatggtgttcgatatcgctcggatgctggcttggcagatcctgccacaacgtgccgcgcagcgctgcgttgatgaactgaatgccacggcagatgcccagaatcggcttgtcccaagccattacagctggcagcagaatcgattccattcggtcgcgctcaggagagagcacctcgctacggccggtggcggaggccgctgcaccaaccatcggtcccacatccggcccgcccgtaaacagaaacgcgtcaaaccgttcggcgcattgcgcaagaatgtcggtgtcatcggtcagcggcaacatgacgggcgtaccgccggcccgcattatcgcctccatatatccgggcagcatccacagactatcgcgcccgtaatccatcagcggagtcaccgcaatgagcggtcgattcgtagtcatgcctgcctcttttcgcccaggtgttgttttcgtcgttctgccgcgaatcgcttgattcagtggccgataatgccgccactgtaccgaaccaatgtaaccggtcggccaacattatttcgttagccagccgcgacgagatcgcacaatgtgccaatgatgggggcattcggtgtgaccttgtcaatgttcgggccattgcactttcagcggggaaagcatgccccgtccgcgcatcatgatgaacgagtaaggttgacggggagggagaatcacatgaaccaggcatgcgtacgcaacgacaccatcgacgcgggcaaccatcatggccgaccgcaataccggtcgttcctgcgatttctgacatcgcaggaacgcaacgtcatttggctgttgctggccattgcttttcttccggtggacggcaccacgcttggcctgtacgcgccgttctggtcgccaatcagtccggcgctgttcgccgtgtactgcctatgcaattggcggcaactgcgcatcgcagccaaccggtacctgccaatgttcctcctaccggtggcctgcataatcctgtccatcccgggatggctgaagttcggcatccacctcaacgccgcgttcatgagcatcaccggattgctgggcgtgctcgccactttgggtgcgatcgcccttgcgttcgacatcaaacgcattccgtggcgtacgccattgcggattctcatcgcatcatactgggtttccttcggagtgggcgtcgtgcaatggctgtccatccgtctgcacgccaaaccgttgaccgactatttctcgcacctcatgtaccggcaatacatcagcgacaactcggtgtggggcggcggccgtccgcagttcctgttcgccgagcccagctatatcggcatgcacctgttcggcatactgcttccgctcatgtggctcatgcgcgggcgcgaccgcatctacgccaaacggctgcgtgacctcatcgtcacgtatgccgtcggcgcggtgctcatgcaagccggcaccagaatcgtcatcgattccgtcgtggcgttgctgatcgcccttgtggcgcgcaccgattggcatgacggcgcacgccgcgtccggggcatgctgcagattctcggcgcatgcgcactgggcctgctgggtgtgctggcggattccagactctccgccatcgcggaaaacggggccgagggagacggctcgttcttcgcgcggatctaccaaagcctcgatccgatatgcggattgctcacccatccgtggacgctgctcaccggttatggcgcgggcaacatcatcaatgcggtgtgggccggcgcggccaaagccggacggctgctggacggtcttggcatgaacggcggcgcggtcacgggattcgcggccggcgtgaacgcggacacggtgtggacgatgtgcgcgtataccagcgtcatcgccgaatacgggctgatcgggctggccatgctggtcggagcctcgatggtctgcatgacgcgcgggaggacggtatgccgtggcggtgcggatggcgcatcgtccgacgggctggcgcacggtgtttgtgtcgccgacgttgccgacgttgctgatgttgccgggggtaatagtggtggtggcgttgccggcgcgggttcgggcgaatccggcgtctggcacaagaccgtcatctgctggctcgtcctggtcgcatacctgtacatccaatgcgagaactatgcgttcgcctctctgccgcttctcgtgttcgccgcctcgaaggtgaggcgcgagcctgatttctcgcgggccgacgcatcgacgcggcccgagatggaccaaaatccagaataaccgacattcgccgctgttccgtttttcgctcaaggcgtatatctcccgtatcttgaggtgcatcatgtatcgtcgcggctaactaatcggcgaaacgcggcatgtttcgcattttgggcgaaaagcccaagtcccacaggaggtattgatgacgttcgttgcacggtcggtgcgctatgtgctcagaaaacgagtgcgaaccatagtgctccttatgatactgaccatcataacggcgagcatgctatccacgatcgcggtttctcgggcagctcaacaggccgccggacgaatcgagaaggaagcggtcggtggattcgtgctgtccagcaacatgcagggcagcatgctcacgcctcgcggaggcggcatggtgcgccccgccgacgtgcgcaggatcgcccaactgcccggggtcgattcgtatatggtccgtcagaacgccaccgccgatctcgtgggggcgaatgtggcgaaggtccccggcggcgatgattacgatgcgacccaggagcagcagtttggcaacgccgccaacgtcatgggcacgaatgattcgtcgaaactcaacgtgttcacgtcgcgcacgctcggcatggccgaaggacgacatctgaaggcctccgacaagtacacgtcgatgatccatgaggatctcgccaaagccaacgggctcaaagtcggagacacgctcacgctcaaggccaacgcctatgacgccgacaacgaatcacattcgacggcgaccgtcaagaccaccatcgtgggcatattcaagggcgacagcgccagaaaggtatccagccgagcggaactcaccgccaacaccatctacaccgatctggataccacacgcgacctgtaccagtacaaggacggcaaggaaatataccaggacgccaccttcgtgctgtccaagggcgttgacgtggagaagaccatggatgccgcgaagaaactcccggtggattggaacaactatcagatcacgcgcaacgaccagtattcatcgagcatgctgcatgccgcccgcggcgtgcgctccatgatgcgcggcgccctgatcggcgtgaccgtctcggccgtgctcgtgctcagtctcatgctgctgctgtggatgaacgaccgccgtcaagagatgggcatactggtgtcccttggcgtcggcaagccctccctggtcgcccaatacctcaccgagatggtgctgatcggtctgccgtccctcgccctcggctggctgtgcgcgcagggaatggcccaatggctcggcgccacggcgctccattccgtgaacgcctccgcggcgaaggagctgagcagcatggggcaggtcggcggcgatcttgaatccagcatgtcggtgcgcaccctggattcgctcacggtgtcggtcgacgggaccgccatgctgtacgtggcgctcggattgttggcggtgatgctggtgtgcgtcgcggtggcgtgcatgccgatgctgcgcaaatcgccgcgagacctgtcggagattcgatgatgagcatgaatgtgtggaagcgtgccacgttggcgatcgtacgcaagccggtacgtagcggcatcatcggtctgctgatgctgatggtcttcacgagcctggtggcgcaggtcggagtctcgacggccctgcgtaccatgtccgacggcatcggcgcgggcatgggcatagggtttaccgtcagcgccggcgagaatcccattagcgccgaggaggcgagccggttctcgcgtatccccggtgtgacgaagaccgcctatgcgacgaagaccttggcgcaggtggatggcgcgcgcccggtcatgccccggcagggcccccgattggactccgatctggccatgcaggtcagcgtgctgggcaccaccgattcctcattgtccgaggaattccagagcggcctgtaccgcctggagcagggccgccatatctcgggcgacggcgacaatgtgctggtccaccgcgacttcgcgatgcagaacggcctatcggtcggctcgacattccgtctccggcaggaggggcgcaacgccacggtgcgtgtggccgggatcttctccggcaacgtgcaggcccaaagccccctgccctcggacacttccgagaacctcatctattcgggtaggcgagtagcttccgctctgaccggaaacgaccggatcgacatgatccgatgcctgtcggataatccgcaggacctgtccgcggctattggacgggccaagaccatggccggcggcaagtacgacgtcaccgacgattcggcccggctctccggcgtcctgcaatccgtgcagacggtgcgtaatctggtgcgcatggtgctgctgtccgtctgcctcgcggacgtactggtgctggcgatggcgctggtcttctggattcgctcacgcatccatgagataggcacgcttctggccctcggcatcgacaagatgcggatcgtcgcacaactcgccatcgaaaccggactcatggcggcggtcgccgccctgtgttcgctgggcaccggcgccatgctgtcgggatacgtgtcttcccgactgttgcgcgattcgggcgtcgcgccgttggaatcgttgcacgtggaggccttgccgcctgagcagacgatgctcatcctgctgctcggatgcgcggtcatcgccgtggctcttgccgtgtcatgcgccgccgtgctgtccaaatccccgaaatccattctttcctctatgcgttaggagtcaccaatcatgtctaactgtctgcaactggaccatgtcgattacgcctacggcgcggcgaagatccgtgttctttcggatgtcagcgcggatttcgaatccgggaagatgtatgcgatcaccggcccgtccggcgccggcaagagcacgctgctgtcgttgctggccggcctggacgccccctcccggggagtggtccgcttcgaaggggaggacatcgccgcatcgggctatgcgaagcaccgccgggagcacgtgtccctggtgtttcaggaccataacctgatcgactacctcacccccgaagagaacctgcggctggtcagcgccaaggccgatatgaagatcctcgaggaactgggtttgagccgtgaggaatccaagcgcaacatcatgcacctgtcgggcggccagcgtcaacgggtggcggtcggccgcgcgctggtcgccccgggccgcgcgatcctcgcggacgagccgacgggcagcctcgacccggagatgaccgacgaggtgattcatctgctgcagcacgccgcccatcagctcggcaaatgcgtgatcgtggtgacgcattccaagcgcgtcgccaactccgccgatgtcgtgctgcgtctcaggagcaagaaactgacccgggcatgacccacctgggccgggcggtgccccggcgacgacccgcatgaaatcatcgtcataatgacgcctgcgatccctggacatgagaaaccgcacctccgatcatcgaatctggattactccagtccaacaatcggggtgcggttcaaaaggccctttttttgtgtcggattacgaaccgcgcgtctcaccgcttgccgttgtagatctcgttgtcgatcacatcggcgaacacgcgattgacggccgggcgcaccactttcagcgacggtgtcaggcacttgttctcctgcgtgaactgcgtgtccagcacggcgaacttgcgtacggattcggcgcgcgagaccgtcgcattcgccttgtccacgtactgctgaatctcctcgcgcaccgcggcgttcgtggcgagccggtcgaccggcgtctccgtggacaggccgtgcgcgggcagccacaatgccagcgactccggatcgagcgtcaccaacgcgccgatgaacgggcgctggtcgcccaccaccacgcagtgctccacgatcgggcacttggcgatctcttcctccagcggaatgggggagacgttcttgccgccggcagtaataataatgtccttgatgcggccggtgatgacgatgtggccctcatcatcgatctcggccaagtcgccggtcctgagccagccgtcggcggtgaacgcctcggccgtcttctccggcagattgtggtagccgcggaacacgttcgggcccttgacctgcagttcgccttcgtcggaaatgcgaatcgaggagccgggcgcgggctggcctacggtgccgatcacattgtcggtcacgcgcgtggcggcgaacggggcggcggtttcggtcatgccataaccctgaatcatcggcagtccgatgccgttgtagaaatgcgccagatcgagcgacagtggtgcgccgccgcaggccacgtacttgatcttcgggcccagagcaccgcgcaccgtgcggtagacgagcgtttcgtacttggcgcgctcggcgatttcggcaaacgtgtgctgctcgccggcctgctccttgcggctccagacgcgcgcggcctcggcggccttgacaaacaggcggcccttccagccggcaccggccttgtgcgaggcggcgttgtataccttctcgaacacgcgcggcacgcccagcaggtaggtcggttcaaacgaacgcaggtccggcagcagggttttggtgtccggcagataaccgaccacgccgtcatcggaggcgatggaggcgtactggatgaatcgtgcgaagcagtgggccagcggcaggaagagcagcaggcgcggatggtcgtcaagcaccacttcatgcaacgcctgcgaggcggagatggtgatggacacgaagttcttgtgggtcagttcggcacccttcgggttgccggtggagcccgaggtgtacacgatggtggccaggtcgcccgtgcgcacggtggccacgcgctcgttcagttcctcgtccgaaacagccacgcccagaccctcgagcgcgcccaacgcgttgccctcgatcatgagaatctgcttcaaggcagggcagtggtccttgaccgagtcgagccggtcgaagcgctcgcggttgtcggcaaaggccagcttgaccgccgaatcgttcatgatgcgctgggcttgcggggcggagtcggtgtcgtagatcggcacgcttaccgcgcccactgcggccagtgcgaaatcgagaatgccccattcgagacgggtggaggaaaagatggtcaccgcgtcgcccttggcgatgccgagcgcgatcaggcccttggcggctgagaccacgcgctcgtggaattcgccggtggtgacgttctgccagcggccggggccgattttcttggcggcgattaccgtgtccgcgccggtgcgggccagtcgttcggtgagcagtgaatagatagtttggtcatcgcggatctcgatggattcgccgggcgtggtgtattcggtaagcatacggccgtttattccttacaaacatgatggcaagttgacaacccgagccattctgacgagttagattacgctggcgtaaggttgcacgcgttgtgggcaatggagaagttgtctgtctggttttgtggattgtatacaacgccgtgtctaaccggtttgctctacggttatgaccgtgtccatttcgggagccatcgacttcctgcaggacaagtacgtgctgagcccggccctgcagggtctggtcatcagctccatcatcatcggcggcgtcggcattggggagtctgtggcttcttatttgggaacgaagctcagcgtgacagtcgtctcagctgaaggtctggcgtgtatgtgcgctttcgcctaaggtaaataggattgcgcagtgcacgccattggtatgtgcaggtatgcgattggtggcacccgcgactgatgcatgacgagacctactgcagtaccacggcaaccaacacggcaacaacacggcaaggggaagcgcaacatgtttgacaaacgactgttccaattggcaccaggtctcggcaagctcatagccggcaaagtggctctgatgtgggttgggctgcttgccaatatcggcttcatgctttcgctggtcatgctgctgcaaggactgctcgccgcagccgacccacacactttctcctgtaacgccgcctcggcctccgagtgccccgccaatctgttcggcgttccgggcaccaccgtcgccccgatggccggcgacctcatggtttacgtggccttggcaatcgtctgcatgctggttcgctacctggccaccacacacgccacacgcctcggcaccgaagccgccgaacgggtcaagctcgctttgcgctccaagctgtaccgcaaaatggtggccctcggcccgtcctacaggtcgcgcgtcaagacctcggatgtggtccagtccgccggcgaaggcgtcgagcagatccagagcttcttcgaactgttcctgccgcagctcttctatgcgattcttgcgccgatcaccctgttcgccgtgattgcgccgattaacatgccggccgccgtgaccatgctcgtctgcgcgccgctcattattattgtcaccggcatcgtatccatgaccgccgcccgcgccttcaaaaaatactggggccgatacaccgacatgggcgccgcattcctcgacaacctgcaaggcctcgaaaccctgaagaacttcgacgccgacgaccgtgccgccgccgaaatggacaagaaggccgaaggcttccgcgtcatgaccatgcgcgtgctgcagatccagctgcgctcgctgaccgccatggatatcgtggcctacggcggtgcggcggccggcattggtgtggctctatggcagtatgcgcataccgccgcggccgccgcaggagccagcgccgccggctggtcgccggtcatgctcgccgcccacctgcccggtgcgttcgcctacctggcctacggcctgcaatacctgatgccattcggagcgggcttccctctcaccctcgccggactgttgctgatcgtgctgctgtccgccgaattcttcatccccatgcgccaactcggctcctacttccacgtggcgatgaacggcatgacctccaccaaacgcatcttcgccatgctggacacccccgagcccgcccacggcactgccacgctgccggccaccgctggtaccgatgccgggactgatgccggtaccaaggccggggccaaggccgatgacggaatcaccgtcagcttcgaccacgtcggctattcctatgacagcgccgattccggtgccgccgttcaacaaacgaattccgcgccggcacctgcgctcaccgacctcaccttcactgcctaccccggtcaactcaccgccatcgtcggcatctccggttccggcaaatccacggctgccgcgctgcttgccggtacgctgaccggataccaaggctcgcttacgctgaacggcgtcaaggtatccgacctgtccggagagacgctcgcccgaaccatcaccctgatcggtgccagtagccatctgtttgccggtactctgcgtgagaaccttctgatggctttgcccgatgacggccagaacggtgaagccgcgtccgacgccgtggattcccgtctctgggacacgctcgaacaggcccgtatcgccgacttcgtgcgttcgcagcaggacggccttgacatgacgattgagcccgacgccgccaacctgtccggtggccagcgccagcgcatcgccatcgcccgtgcgcttctgcacgattcgccggtgttcgtattcgacgaggccaccagcagtgtggatgtggaatccgaggaactgattctcgcgaccatccgcgaactggtgcaatcccgcggcaagacggtgatcatgatcacccatcgcatggccaacgccgagcacgccgaccaagtggtggtgctcgaacacggcaagtcggtggaaaccggcacgcatgccgaactcatggcggccggcggcgtgtacgccaagttgttcactactcaggcggatatcgagaactttgggggtgacaaccctcagccagcttcgctgacagcttccgccagcgggagcggggcggctgtgggcgcagctccggctgcagctccggccgagatgagcacgttccaggtcatcaagcgactactcggggaggccaagccactggccgggcttatggtcgcggcttccacggccggcaccatcggtcaccttgccgcaaccttcctaccggtgttcggcatcatcgccggattcgcgctcgccggcaaccccgtgtggggcatgagtgcggccggtgcaatcaccgccatgattgtttgcgcggtgttgcgcggcctgacgcgctacgttgagcaatatctgaaccacaacgtggccttccacctgctcgcgctcttccgctccaaggctttcgccgcccttcgccgcctcgctccggccaagctcgccggcaagggcaagggcgacctcatcgccatgctcaccaccgacgtggaactgctcgaaatcttcttcgcgcataccatcagccccgtggccatagccgtgaccaccaccatcgtctacgccatcgtggcggccacgctgagcccctggatggcgttggcgctgatcgtctcccatctgatcatcggcatcattgtgccgcgcttcttcgccaccggcgtgcgcaatctgggccccgccatccgtggcgcggccggcgaactcgacaacgtgatgctcgacgacatgcgcggtctcgacgagatcatccgactcggtcggggtgaagatcgtgcgcaggccatcgaagaccgcacgcgcgcgctatggcgtgaccatgccaaactcagccgtgtcaacggccggttcgccggtgtcggcggattgctggttgcattgcttacctcggcggctgccggcatcgccatcaatcttgccggcgtgaacctctacgatatcccggcgctggtcgccgccttcgcgctgctcgccagctcgttcgggccgacgctggcgctcgccgccctgcccgcgaacctcacccagaccttcgcctccgcccgtcgtctgttcggcctgatggacgaagcgccggccgtggtggaaactggcactgcgaactcggattatgagggcatgcgccttgaccgcgtcaccttcgcgtacccgggggaggggagcgaggcgattctcgccgacttctcgctcgatgtgccgcagcacggcatcctcggtatccaaggcccgtccggccggggcaagtccactatgctgaagctgctgatgcgctattgggatccgcagcgcggccaagtgacgctgtccggcacgccgctaccgcaaatcgatgtgcatgcccgccgccgtattcaggccatgatgagtcaggagacccacctgttcgacggcacgattcgagagaatctgcttatcgccttgcctgaatcggagattcgcaatgggggagcggccggtgttcttgacgcccgactccgcgaagccctcgccaaggcatccgtgctcgacctgatcgattccctgccggatgggctcgacacccaggtgggcgagctgggcgaccgactgtctgaaggcgaacgccagcgcatcggcttggcccgtgtattcctgcgcaatgccgacttggtgctcttcgacgagccgaccagtcgtctggatgccttgaatgaagccatcattctgcgttccattcatgagctgtccaagagcgagcagaatgcggataaggggcaagacgtggctgtggtgctggtctctcaccgtgaatccgccatgcgcgttgccgatgcggtgctgaatctgtaaagtcgcacagtcacaggccgcaatactctgcaatacaggatttccttatatatcagcctctgataagggcatccagagagtcgagggccgcgtcgatggcctgagcctcgcggtcgtcatccgtctcggcgaaggaatgctcgctgtaggaatcctcgtcggcactgggcaacaacactccgcgaggcgtatcggcactgtgcgcgtgctcaatagaggccatatgtgccggctgcacggcatttgtctgcttgcggtttcgattcgcgtcattcgcggaatcaacggcatctgcggcatcaacgctatctgtatcatccgcaccactgcgcgtagtcggccgattcgccagcgtgaatggatcgtcgggcagtgaatcggccaaggccgcgactgctgcgctggccgctgcctcggccgccgcgctgtccagcatcgcaccatccgcagagtcagtcacggagccatccacagagccatccgcagggccgttcgcagagccgtccgtatactcaccgtcgtgccgtctactggatgacttaccaaccagaacagcgcccctcgtacgccgcataagcgacggcacgttctcatccgtcgtaacttccgagacggtcgctgccgtgtcttcttctgcagccatattcgccgctgccttggcggcttcctcggcagcgcgctgcgcctccagccgttctgcctcgacccttttggcggtctctatggcgaaaatcttctgctgtgccgcagcgcgagcccgctcagccgcatccataatgcccaatgcctgctgacgttcgttttcaatacgacgcagcgtggcttccgcgtggcggatattcgcatcagccgtgctcagcgcgtattttgcgtaggccaaatcggttttcggctgccatagatgctcgatttcctccagcgtgcgtcccattgtctccggcaccaacgccacgatgccgaacaggcaaatcagatccagaaccgcgaaaatcgcgaacgatatgccgccgcccaatccatcgatcatcatcggcgtgaattgtgcgatgatccagttggcgaacagcagacacatcacacacaatccggtggcgcgaccgcgcagatacgtggggaagagctcgggaatcacaatccagggaatcggtcccatcgaaaaggcgaacgatatggtgaacgccatgacgaatataagcgtcagcagcgaattgcccatgaaatacgagcccgaaatgcatagcgcgaacacgcacatcatgccggtgcctatttccataagacgtttacggccgaacgtgtcgatcaggtacatgcctaccacggtggccaccagctccatgccgcctacgctggcggccgcgaggaactgagtgtccccggcgaacccgagatccgagaacatcaccggcccatagtaggaaatggcgttcatgccgatgaactggttgaacacggcgagaaagatgccgatgacgagtgcccgtcgcaggcctggacggaacaaatcatggaattcgtgcgacatctcggtttccagtttgaccgaggcttggatgtcatcggtgcgcaggcgtgcgcgttcggtgccgaggatgtgctcgagcaccgcgaaaccttcatcggttctgcctatctgaatgaggaatcgtgggctttccggtgccctccgcatagccagcaggaaggtggcggccggaatcgcgcctaatcccagcatccagcgccatccagtggcgatatcccagtcgtttgatccgtgggaggcgatgatgtagttgatgacgttggtcaggaagataccgcaaaccgcaagcagctgataagagaaggcgagcagaccacggatgttggccggagccgattcggtgatgtatgtgacggccagcgcggcggtcaggccgatgccgtagccgccggccacgcgcgccacgataagcgctatgggacctatcgtcagcgcactccatacagccgcaacgaggaagaacgcgccgccggtaataaggatacgtttcctgccgaatcggtcggaaaggaatccggcggtggccgctccgatgacggcaccgagcatgatggaggaaacgacgaggccctccatgagagtactgagcccgtatctggcgcgcaggaattcgatggcaccggagatggagacggtgtcgtagccgtacagtaatccggcaagacccgcactcaaagccagtccgaatgtatattttcctgatccgcgggtgcgtatggctgttcctaaaggattgggctgcttggaagcagtccgaaacagtcccgccatgtgctcttcctctcaatacagctatggtggtgcctattcatactagccgaactggctccgtctggcgctggacatccacgaatgtgaacgctctcggaattgtggatgtcggaggctgaagattcttctgtgtgcccgaggtggcgagttttggcgggaaatcaggcgtgtcgcttgattttgacaaattggtacacgggtgtatcatcatagatattggtacacgggtgtaccaaagaaaacaccccaaaaaagaccgtcagcggagcatatcgcaggcgaggaacccaggcccaaggtaagtccaaagtcccgaagccacgaccaatcccaacggctcaggaggagataacatgcgcaacaccaagaaggtcatcgcagcaacggccgccgccagcaacatagcatcggccatgagccggtacaataaaggacttgattgatatgactactcgtagaacgttcaggtggccgtccctgctgactgaatccggtcgtggcatcgcgttcggcggcgactacaatccggaccagtggcccgaggagacactggacgaggacattcgcctgatggtccaagccggcgtcaacaccgtggccctcgccatcttcagctgggacaagatcgaatcgcgcgagggcgagttcacgttcgagtggcttgactacgtgatcgacaagctcggcgcggcgagcatcgccgtggacctggcatcggccactgccacggccccgttgtggctgtacgagcgtcatcctgaggtgctgccaatcgatcggtacggccatgtggtcaatgcgggctcacgccagtcgtggcagcccacaagcccggtgctcaaggaatacgcgctgcgcctgtgccgcaaacttgccgaacactacaaggacaatccatacgtgacggcctggcacatgggcaacgaatacggctggaacaaccgctacgactactccgacaacgccttggccgcgttccgcacgtggtgcgaggccaaatacgggaccgtcgacgcgttgaacgaagcgtggggcacggccttctggtcccagcacgtgaacagcttcgacgaggtgttgctgcctcgccacatgggcggcgacagcatggtcaacccgccccagcagttggattacgagcggttcggcaacgacatgctgctcgacttctacaaggccgaacgcgacgccatcgaagaaatctgccccggcaagccgttcaccacgaacttcatggtctccaccgaccaatgcaccatggactacgcgcaatgggcaaacgaagtggacttcgtgtccaacgatcactacttccatgagggcgaatcccatctggacgaactcgcctgctcggacgcgctcatggactcgctcgcgctcggcaagccgtggtacgtgatggagcactccacctccgccgtccaatggaagccgcttaacatgcgcaagcgcgccggcgagctcatgcgcgactccttggcccacgtggccatgggtgccgacgccatcaacttcttccaatggagacaatccgcatcgggtgccgaggcgttccactccgcgatggtgccccacgcgggctccgatacgaaactgtttcgaggagtgtgcgaactcggcgccgcgctgaagacgctgtccgacgcgggtgtgcaagacacggaactgaagcgcgcggacacggcgattctgtttagtgcggaatccgaatgggccactcgctccgagaccctgcccagcatgaaactcaatcactggcatgacgtacgcgactggtatcgcggatatctcgatgccggagcgcgcgcggacgtggtcccgctcgcctacgattggagcggctaccagactatcgtgctgcccaccgtgatcgccctgtccgacgaggatacccgtcgcatcgcggactttgccgaaaacggcggtacggtcatcgtcggctatgccaccggcctgatcgacgaacacttccacatcggtctcggcggataccccggcgccggcaacggacttctgcgcgacatgctcggcatccgctccgaagaattcaacatcctcggagaagaagccgaagacgaaccggccgaaatcggtttgtcgaatggactcacgacacgtctgtggcagaatgacgtgacctcggtcgctccagacactcgcgtgcttgccacgtacgtgggtacagccgctgctgactgggagctcgacggcgtccccgccatcaccagtcacccccacggccaaggcgccgccatctacgtgggctgcgatcttggccgccacgacatcacccacttgctcaaggaactcaacacaacagccccctccgacgaaagggctcccgaccaaaggccgggtgggggagagatcaacgccgcaactacgaccgcagcagccacgactcatgacccccgcatcctgcacaccatccgccaatcctcagacggtaccatccgcttcgatttctatctgaaccgttcgaagcagcccgttgccgtcaacggtgtggaaggtgatcccatcatcgcccaccgttgcgagactgacgccgttggatatacgctgaaccgcaacgccattcttatcgctaaaacgtcctgctaaaccgcgctagaatggcaatgttgtccggatagaggagtgtggcatgagcgacgagaaaacagccaagcgtcgagtgacgctacgcgatgtcgctcaggccgccggtgtatcgctcaaaactgcgtcgaacgtgatcaatggctccgggcgtatgaccgatgaaacccgtgcaaaggttgaaacagtcattaaggacctcggctaccgagtcaacgtggccgcccgtaacctcaaccgcgatcacaccggtttcatcacccttgccgtgccttcgctgattccgccatatctggccgagttggccaaccgcaccatcgaggccgcccgtcagcgcgactactccgtatacgtcaccacgtatgcagagggctcggccaaaggagcgcgtgacctgctcaagaacttcaactccaccgtgtcagacggcatgattctctccatgagcgaggtggaggatatttcgcccgaagacctgaaggtcgatttcccgctggttattgtcggtgcccgaaccacatggggtgttgccgaccacgtgactccggacgatgttgccgccgcagcaacagcggcaggctacctatacgatcgaggttcttctcgcctcgctgtagtgggcgcacgagacgactatgacgcggccgctttgttgcaggctgtggaaggcaacgcacaactgcgtttgcgtggtgtcattgaagaaacgcgccgccgtgggcttgagctggatcctcatctgattggcaacaccgatcaggattggaccatcggcgctggcgctcgcgtgactcagcgactgattgattccggcgtgccattcgacggtgtgatcgcactgaacgatcagttggccatcggcgcattgaccgctctgcgcaccgctggttatgaggtgcccgcgcaggtgcaggtcatcggcttcgacaacaacgaggaagccccctacctgcagattccgctgaccaccatggattcccgccttgactggacagctcccacggcagtgaatcgcatcctcggacgcatcgacggcagcatcaccaaacccgaactgctcaccaccgaatcccaagtcatcgcccgcgcctccacacgctgacgctaatctggctcccctccctggggggagctgtcaccgaaggtgactgaggggagccttgcggaacattgtcatctcccgtcgtaactcgtaattgtcactcgtttgagtggccccatgtgtcatcggaggtagccgttcactccgctccgagttcgtgcatctctctctccccccccacgataagagacgccgttcaatcgtttagtgactttttgttaatttctgtgcttaagtagcaactttatgtgtgttttctctacgatctggtgtatattattttttggtttaccggtgtattgcacgcgcgatgtgtgaattgccgcaacatcgctgatatgcgtacatggaatctggaggaatgtatctgatgacggcatcaactgaatcgtctacgcaatcccatcatgatgagaaagaggccattgctcccgcgcgacttgtggcctacgcgctcggcaacttcggccagtcggcgttctacaacgcgctaagcacctacttcgtggtctatgtgaccaactcgctgttctccggagtggacaaggccgtggcgggcaagctcatcggcatcatcacctcgctgatcgtgatcattcgtatcgcggaaatcttcgtggacccgctgctgggcaacctggtggataacaccaccaccaaactcgggcgattccgcccttggcagctcatcggcggtctggtgtccgccgtgctgatcgtcatggtctacactggcctgttcggcttggtcaacgtcaacaccacgctgttcatcgtcctgttcgtggtggtgttcgtggtgctcgatgtgttctactccctgcgcgatatctcctactggggaatgatcccctccatctcttccgactcccatcagcgcggcatctacaccgcagccggcaccttcaccggatcgctcgggtacaacggtctgactatcgccgtgatgcccatcgtcaccttcttcagcttcgatgccggccagcagaaccagaatggttggaccgcgttcatcatcatcgtggccctgctcggcgctctcacggctctgagtgtagtgttcggtgtcaaggaaaaacagagcacgctgcgcaccaaggcccaggagaacggtaacccgattgaagcgttccgcgccctgattcacaacgaccagctcatgtggaccgctttgtcttatgtgttctacgccgtcgccaacgtggccaccggtggcgtgatggtctacctgttcaaatacgtgattggtcgcatggaccttttcccggtcaccggcgtcatccctattgcgtgcggtctgattatgtcggtactgttcccggtcatcactaggtgggtgccccgccgttatctgttcctcatcggcatgtccgtgatggtcgtggcctacctgctgctgattgtcgcctccacgaatataccgctgctgctggtggcactagtgctgttctacctgccgcagacccagattcagatgaccgtgatcgtgtgccttgaggactccattgaatacggccagctgaaaacaggcaaacgcaacgaagccgtgacgctgtccgtgcgtccgatgctcgacaagatcgccggcgcattctccaacggcttcgtcggcttcgtggccgtggccgccggcatgatcggttccgccaccgccgccgacatgacggccaaggacatcaccatcttcaagaccttcgccttcatgattccgctggtgtgcattgtgcttggcctgattgtgttcgcgattttcgtgaagatcgacgaaaaggcccatgcgcgtctggtcgccaagctcactgagaatcttgcgacggctggcgatggtggtggtaacgacgatggtgttggtgttggtgacaatggtgagcataatggtggccacgccagcatcgcgtcggaagattccgcattggcggaatacggtcccgaactcgccaagcgggtgttgctcggcaaatagtgttgctgtgcgaatgagctgtttcatggggtggtgattggcccatggggcggtgaattcctcatggggcggtggttgaaaatggctttattctgcggaaggtaaaattttaccgaccgccccatgggcaagttaccgccccatgggattttcgccgccccatggatgtacgggtaaaggcggccgaattgcctcgtgccgcccccgtggatatgcaagttaaagagcatcggcagcatgactgaatgcacatagagcgtcccccgcatggttgtgccacgttccatggcggggtcgccgtggtgactgtcgccagtacacgccatgccacgcgagcacgttgttgccggtgttccatggcggaaacgtcgtgggcatacaccttggatgatggcgacgacgattccaacacagtacccagtaaagtaaccgccgataacctcaagaaatacgacatcagcccgcaaggccaggccgatgagattcgcatggtcgccgaggccgtgaacaatatcggcgacaacgatggcgatggcgataagaccaacggtgcgaatggcaacaaggctactggcgtgctgagcaagaccggtagcgcggtgactgccgtgggtcttgcggtcgtcgttctcggtgcagccggcggggtctcgtttgctttgcgtcgtaagcgctcctgataaggactgactcggcattatgatgcggttgccagttgctggctgtcggctgtcgtctgccagatgcggctgtctcggcgtagcgatgcgattctgtcccggttcgcgcatcaatcgattgatgttaataccgggacagaaatcattgtcccggtttgaaaaaacgggcgtttttcgcgtaccgggacaattctcgttgccccgatacgagcgtcaatcgttttatgtgcgaaccgggacaacatgtcgatctcgggattgacggtattccgccgattctgcttgtcggggtatgtggactttgaaaattggtttgtcccggttctcaaaaatgggccgaaattgcgtaccgggacaacgatttctgtcccggtagaaacgtcaatcgattgacgttttcaccgggacaaattcgtgcccagaggaggggaagaggggctccgcaatggcgctgggcatcattgtggttggaggcaaattcgcgtccgggaacaatgggacgaggccccggtcgcaggagtagagcgtgatgttgtcatgattatgaccggctttcccacatggaaggccagtcataatcatgccgtttacccgcacgctccctgcacaccggccgcacatcacccacataaccgtgtacagtggcgtgtagtcgcagcaataaaggagcatcgcacatcatgaccaacggacacatcaaccccgccaacgtgccggacatcgccttgaaagacggtcattccattccgcaagtcggtctcggcgtgctacgtatcgacgatgagggtgtggtccccgtcgtcgaatccgcgttggaagccggctaccgccatatcgatggtgcggccggctacaacaacgaggccggcgtgggccgcgcgctcgccgcctccggctacaacaccggtgccaagcgtgagaccctgtgggtcaccaccaagctgcgcgactcccagcagggctacgattccgcgctcaaggcattcgacaactccctgaaactcctccagctcgattacgtggacatgtacatgatccattggcccacgccgttcgactggcgcagcaccgacacctggaaggcgttcgtcaagctgcgcgacgaaggcatggcacgcacgctcggcgtatgcaacttcatgcccgccgatctgaagcgtctgcacggggagaccggcgcatggccggccgtcaatcagattgagctgcaccccacgtggcagcagcgcgaagtggtggcgttctgcaagaagcacggcatcgccgtggaggcctactcgccgatggcgcgtggcgccgacctcaacgccggcgacggcaccatcgagaagatcgccgccgcccatgaggtcagcccggcccaggtgattctgcgctggcacatcgaaaacggcacgatcatcatccccaagtccgtgcatgccgaccgtcagagggagaatctcgacctgttcggcttcgccctgaccgccgatgaacacgctgccatcgacgccctcgacggccccacccgcgccggccacgaccccctcaccttcacctatgcgtgattgatggcacgtcgtaacgcccacttccgccgtcgtttcaacgcctctggaccgctggagcgcgtgctgattctcatcgttctcgccgtagcaatcggcgtgaccatcggcctgttactgccgcaggtcagctccgacgcggccaaaatcaccggtggctacactgccaccggttcagccgccgacactttgaacgcgctcgccgtagacgacaaccaaagctcctccggctacgaccgcgattccttcggtttccgcaccaccgacgtcgacggcaatggctgcgacgtacgcgacgacgtgctcgcccgtgatctcacggacatcacctacaaatacgccggttcctgtgtggtcgagtccggcacactggccgatccgtacaccgctcagaccatccattttgtacgtggccgcgccaccagcgccaaagtgcagatcgaccatgtggtggcccttgaaaacgcttggcaatccggtgcgcgcgactggtccactgccaaacgccatgaattcggcaatgacccctacaacctgctggccgtcgacggcccggccaatcaggagaaggggtcggcttccgccgcctactggctacccaccaacgccgactaccgttgcgactacgtggcccgccagattggcgtcaaagacaagtaccagctcaccgtcacctcccaagaaaaggacgccatgctcgccgtcctccacacctgcccgggccaggccgtgcccgcagacgaataggggctaccgctcaggattgttgagcataggtgcctgcccctcgtcataagcgcgcaggagccgtcggagcaaaaatgtggtgaagtatggtgcggtgaacacgtgttcgctactaccgatattgccggcggatagtttcacgccgaactgaatttccggataagaatccgaagcgattagcgtccgcatggatttggcggtgccttttttcgatttcacctccaccggcaccagccattcgcgcgtgcggacgaagaaatcctgttccagtgtggaatcctcttttttgtagtagtacaggtcatagccggatttccgtagcgcttcagagacgatgctctcgtacatagcacccttatagacaccaagattacgattggcccgcagatcatcactggcctcgtcgtcaagcatcgctacgaacagaccggtatcgccgaaatatatcttgaacttgttttcgtcataattgcctttcaacggcagttcaggataggacatacatcggcagatattcaccattcccgaggtttcaagccattccacgcatcctcgatagtctttgaaacgcgctccgctggcaaccttgctgatttggaacttcttgttttccttggcgagttgcacgggaatatggttgaacacgttgagaattcgtgcctgatcgagtccttgcgcgtatttgcggatatcctcctggtagtccaaaataagctggcgctgcaattgcagtgttccttcgaacgtgccagtgcgtatatgggaggcgacaaccgcaggcatgccgccaagcacgcagtaatccataaatgccgtggagaagacgttcatttccacttcagagaatggcgtagcatcacacaggtgggtgaacatgctttcgatgacggcctcatcgtatccgcgagcccacagaaattcctcgaagtccaacgatcgcatttcgtagtcggtcttatatcccacgctattgctttcgatttgcttatagctgatgcccaacattgaaccgctgcaaatcacatcatatttgccgtcgattttaaagaacttcagtgcagtgacgatatcaggatgggcctggatttcgtcgaaaaagatgagcgtatcgcccggaatgaactttttggctgggtcgatcagggaaatattgcggacgatggtatccgcgccgtaaccgtccgcagtgattgcgcgatatttcggttcctcaacgaagttgatttccactaccgaacggtagttgtgtgcggcaaagtaatcgatagtctctgtcttgcctacttgacgagggcccttgatgattagtggggagcgattcgggtcggatttccatgcattgagataggtatcggctttgcgtttgagatacatgaggagcccctttccgaattactgctatatcaatgattttacactttcatgagcgagttttctaccgtctggcacatttcatgagcgagttttctagtaatttccgcatttcatgagcgagttttcggcggtttgtcacatttcatgagcgagatggcggggaatgccagctgccagtccgccagtcatccatcaatcgtccgcagattgtccgtctgttgacgcgggaaacatgcccgcgctataactgagcccggtatgaagggagaagggaataggaacagacgatatggcagtaacacacaccgcagcagatgccattgcggcaaccactatgacgaacgccgtggcagacatcgaacaggaaacaccggaaatcgagaaggaacgccagcttgccggagtcggagccggagctggaaccgtggcaaacggcaagaaaaagccgcatgaccatgcgctggccagcatcctcggccccgcgttcgtggcggccgtggcctacgtcgatcctggcaacgtggcagccaacatcacctccggcgcgcgatatggctacctgttggtgtgggtgctggtgctcgccaacgccatgagcgtgctcatccagtatcagtccgccaaactcggcatcgtgaccaacaaatccctgccggaactgctgggtgaacgtatgagcgatgccggccgcttcatgttctttatgcaggccgaggtcatcgccatcgccaccgatctggccgaggtgatcggcggtgccatcgccctgaacctgctgttcggattgccgctgttcatcggcggtctggtgatcggcgcaatctccacggtgatgctgtggttccaaggtggcaagacgcaaaccacgttcgagcgcatcatcatcgtgatgctgctgattatcacattcggcttcatcgcaggcctgttcgtggacccgccgagccccggcgaagtggtcaagggcatgattccacgcttccaaggcaccgactcggtgctgatggccgcctcgattctgggcgccaccgtgatgccgcacgccatctacctgcactccacgctggtgaacgaccattacgcaggcggcgaaaagccatcgatcaaaacgcagctgaaaggctcgaaaatcgatgtggtctgggcgctgttgctggccggcaccgtgaatctggcgatgctggtgctcgccgccaactcgctgcacggcatgtctggcacggattccatcgacggcgcacagcgggcgatcgcgcaggtgcttggcccggtgatcggcacgatcttctccatcggcctgctggcttcgtcgctgagctccacatcggtcggcacgtatgccggctcggaaatcatgcacggtctgctgcacgttaacgccccgatgtgggcctgccgcgtggtcacgctggtgccggcactgattgtgctgtggttcgccaaggacccgactcaggcgctggtcatcggccaggtggtgctttccattggcatcccgttcgccgtgattccgctgatgcgatacacgcatgacaaggaactcatgggcaagtgggctgatggaaccgtcaagcacgtgatttttatgattgtggtggcactgattgtggcgctcaacgtgctgctgattgtcctgacgctgatgggcagggcgtaatagactccagctgaaatcctgcgatagcacaacataataagaagccccggtgctggaaccggggtttctcattatgttgagaatggttgaatctgccgtcagttcgcagccatacgccgcgcacgccgttcgcgcagcgcgcgcaaggaaataatgtctcgcgtacgaccggcaccgtcgcccttgacgccgaagaacaccatcaacaccattgccagacagattattgcggagattcgcagcgcccattgaatgccgaaaatcgaagcggcgacggcggaggcgccgccctgcttatgcaaagcggcaaacgtttccatcagaatcaccaacacgggtgcgcccacagcgcccgcaatctgacgcgcggtattcgtcaccgatgatccggcggacacttcgctcggcccgttcaggcaattcagggaccacgtggtaatcggcatcagcaggaaacccatgccgatctgacggatgaactggcagatcgatacccaccagatccacgtatccatcgccaccagcgacatgcccaaggtgccaagggtcaacacaatcgaaccgaacaaagccaccgggcgcgcgccgaaccgatccatcgcgcggccgccgaagaactgggagacgcactggccgatggcgcccggcagcatgatcagaccgctcatcgtggccgaatagccgcggtcagtctggatgtagagcggcatgatgaccaaaatcgaactgaacgcgaaaaatgccagcgacgcggtaatggtgccgacggtgaacgaacggttcttcagcacttccaagtccagcagcggcggctgggggagtgccgacttgtccttggctacggcctcgcgataccgcttgccagcgcgcaggttacgcagcacgaaccagacaatgccgaccagtcccacaaccatcggcccccacgtgaccggtgccgcgaatccataggtctctgaattggtgaagccgaacataagcccgccaaagccgatcaccgacaggcatgccgagaagaagtccgcgcgggccgaagggtcgtgtgaaccgaaattatgcagtccgaacatggccgccagcagcgagattacgccaatgatggtcatggtcaggaagatcgagcgccagccgttggcatcggtctgccagccgcccaaggtggggccgatggctggcgccacgctcatggccatgcccaccgtgcccatggcaaacccgcggcgagacagcgggtaaatggagaacacggtgatttgcagcaccggccacatcacgcctgtgccggcagcttcgagcacgcgcccgaccagcacccatacgaagtttggccccaaccatgccagcacggagccgagtgtgaacaccgccatcgagcagatgacgatctggcgggtggagaagcgccgggtcagaaacgcggttagcggcaccatcacgcccatgaccagctggaacacggaggtgagccactgcccggtggttacggagatgtggaattcggaaacgataatcggcagcgcggaactcagctgcaactgcgtgaagttgcccacgaaggtgatgaaggtcaggattgcgatcgaaataaacgccgcatggctcagcttgccatcgacgtacgattcctcctggctcagcacccgctgcagttcgccgcgacaattcttgatcctgctctctccagccacgcacactctccacttccgttgctcggcctgatggctttgggcggtgtcggttggcatgtcggttcttcatgcggcgtcatatgtcgcgcaacaatcgatggtttcggcgaccgtctcttcatgtgcttggccgggcagcctctcaaaagcaccccaatacgttatacctgggggtgcccagtcggttcggaatatgtgcagaagcggggagcgaacccacttttcgcaagagaccggggcataataggcggttggtcattgcatagatatgcaagttggctcagacattttgggaattggtatgagcaggcatagggcagggcacgcagtaagtattccgagcagaaggcaccgtgtctggccatgggtggtgtcgattctggcattgctcgtggtgctgttaggcgtgtgtggattctgcggattgaaaccgtattccggaagccaagcaggttaaggctcatgaggagcaggctttgcaattgttgggtggcatatccgatctcagcaatctcgacaacgttgataaggtgagttagcagatcgatcaagcgaagaccgaaaccgccgcggcgaacgatattgtgcatggcacgctgtggaacattgcctcgaaactgccagtgtatggcgatgacattaccgccgtgcagggcatgacttcggtagtggattcattgattggcgactcggtgccgcagtttatgaatgtgctgactactttgaagaatgcgcaactgagcacaggggatgggcagctgaatattcagccgattctggaggcgcagaagaccattgtctcagccaatgaatcgctgcaacagcaggtccagaaatatcagaatctgccgaaggcccatatcggcatagtcaacgatgcctacaacaccggcaagactcaattaacgaaattggccgatagggttgatcagctatctggcacattccagattccgccgaattttctcggctctggccaagcgcgtacatacgcgttgatggccatgaccacttcggaggagcgctcatccggtggcctgattggttccgtgggtgtggtgactacggacaacggcaagattagtattggggatttccgctcgaacaaagagtgcatcccgtatggtgctggtgatccaacggaagatgaacagcgtattttcgagcagtgggggcctctgaaaatgtcgttcgatatccgtgatttggctgtatatcctgatacctctcgtgttgcagaaggtatgcagtctatctggcagcgcacatcatggggacgtgacactccattggatggtgtgctcatggttgatccggtgtttctgcaggaattggtgaaaatcaacggcaacatcacgctttctgatggccgtgtgctcgccggaggcaacactgctgaattcctgttaaacaaggtgtatatcgattatccggtttacatgcaggacacctattttgcccaagtcgccgagcaaacagttagtaacatgttctctaatttggatttgacgaagctgagcaaggtagcgcaactgatgggaagtatgtcggaaggtcgttgcttctcaatgtattcgtttgacgaggctactgagaagactattagcgatgcaggcttcactgcacagactccgagcagtgaggaacatccgcaggcgggtgtgtatgtgactgagcagaacccgtcaaagatggggtggtatattcaccgcacgtcgaagataactcgttccgcctgcaataatgatggttctcagacctaccatgtggaatatacgatgacgaatacgatagacgataaccagattggcatagctggagctgccggaacgtatattctcagtgtaaacgctgatcaacaaggccgtggcgtagagaaaaccttaatctacgctcctgcgggaggcagcctcacgaatcttcaaacctcaggtggtacggtgactggtagtcgtcaggagactttgaatggcaagaccgtgtatgccagcatcgccaatatcggccctggagaatccgttacctactcctttgatgtgactacctctatcaaggccgtctccgacctcaccatcgaccaaactccaatgggctggactgattccggtgtcaccactgacaccgctgcctgttccatcaacaagcagtaaaaactgagctctctctgtgagggagctgtcagtcgcgctgactgagggagggatcaaaaaacggcgctgttgttgttttcgtgggtggtggttcgttgttgaaccgttgtgggagtaagagaagagcgctttttgggtaggatgtttaacgaccaagaaaagcacagccaaaaagcgcctgatgagcagcatattcaaccagcttctcaacgtcaaaggcacggtggtcgaggacgtgcggatcgtcgactcgccgttgcgtcccgagcccgtgctcgaggtccgcgtgcgcccgcgtgcgggcgcgctcagatgctcccgctgcggaaggaggcgccgcgggtatgaccagggcggcggcgtgcgccgctggcgtggccaggacttcggggctgctggcgcgtcgaactggtcgccgccatgccgcgcgtggactgcccgaggtgcggcgtcgtggtcgcctccgtgccgtgggcggaaccgggcagccggttcaccagggatttcgaggcggagtgcgcgtggctgatgacggtcgcgaaccagaagacggtcagcggtttccttcatgtgtcgtggaggaccgccggcaccgtcgcccgtcgggtcgcggaacgcgtcaaggcgtcgatgccgtcgccgttcgacggcctgcacgcgatcggcgtggacgagaccagccatcgcaagggctacacgtacctgaccgtggtcgtcgaccacgagcggcaccgggtcatctgggcgcacgacggggtcggcggggacgtgttcgacctgttcttcaaggcgttgacgcccgaacagcacgcctccatcagggtcgtcaccggcgacggggcccgctggatcgacccgtgcgtcggccggtggcgcccgaacgccgaacgcgtattggacggcttccacatcgtcagctggatgaccgacgcgctcgacaaggtcaggaaacgcctgtggaaccaggcgcgccgcgacggcgacgagaagaccacgaagcgcatgcgcggcgtcaaatacgcggtcctgaagaaccccggcgacctgaccgacagacagtccgaggcgttcgggaacctgcggaacacaggccccaagggccagctctaccgttcatggcaactcaaggaactattgaggaccctgctcaagcacccgctcgaacaggccaggggcgagttgaggcactgggtgttccgggcctcgcattcacgcatacccgagatcgtcgaaccggcgaagaagatccgacgccgccggccggacatcctgcgcacgatccagctgggctactccaacgccaagctcgaggccttcaacaacaggatcaaggtcaccattcgcatggcctacggcttccaccacgtcgacaacctcatcgccctgatcacgctcaaatgcggcggactcgacatccgactaccacaacccacgatctaacccacgaaaacagcagaagcctcaaataagtcccatacacaaacaatttgacaagctcgtcgaacaccttctgtccgtgaccctgatgcatccagatgacgcgcccccggtcgtggtcgacgaccacggtcatgtacttgtggcccttcctgtagctggtctcgtccacgccgatggaacgcggcccgtcgaacaggcccggaccctgctccgctcgcaggtcgtcggcgacccgtctgcataccgggcccacgctcttccagtccatgcgcatcagccggctcaccgcgcttctgggcgcgtgcacgttcagaagcgccgtctgctgttcgaaatcgcgcgtgtacgcgctcttgcgtctggcccacggcatcatcgcgacggtcacgccgtgatcagcgcatgtcacgtgcggcggcgcgtactccagcatgagcctggcgcacccgatgtcgaggtgacgccaccggcgcacgcctagccggtcgtacggcctgacatgcttcccgcacctggtgcaccggtccatgtccttcgcgtacggtcgcaccgggactatgacgacgtctccgccatgtgggtccttctcgatgcgcggcacgccggccacgacgttggcgggcaggccgcgcatgcgcttgagcgcgccggctgatatggtgggcaaaggcgttccctctgttttttctgtttgtgcttttggcggaaacaaacctaacaggagaacgcccctttcatacccgcacacaggaagaacccgtcaacgacaccgaccccgcccctcactacacaaactggcgaagactcaagaaaactcagtatgacccagttcccttaaacacagcgactactgtcttcaacagaatcgcaatatctccggtaatggaccagtcctgaatatatgacacatccgcatattccgactgtttctgagtcaaatcgctgcgtccggaaatctgccaaggcccagtaataccaggcttcaccaacagtcgtgtggaatacagcatgccatatcgtgcgacttcctcaggcagcggcgggcgaggcccgaccagactcatatcgcccttgaacacgttaaagaactgcgggaactcatccagagacgtcttgcgaataaaatgaccgatcttggtcacgcgcggatcatccttgagtttgaaaatgaagcgatcctcaatgccacgttccttagccaatttggccttgatcttgtcggcatcggtacgcatggaacggaacttatacatggtaaacggcttgccgtaaatgccaatgcgtgtttgtgaatagaacaccgagccgccgtcttctcgtttgactttatacgccacccacagcatgatgggcgagctcagaataatggcgatggcggaaagcacgatatcgcaaatacgcttgagaatgcgagtaatggctgaatactgcgtgagtctagcagtgaccaccggcatactcggattattgcggaagtgcagatctgcgccgcttagatcggccacggacgcagtcattgccaactcaatgcccatggactccaccgcgagcgacaacgtacgcatggtttcggaatcgcgggtcagtacgtcggtcactagcacagtgcgtgctttcatacgcttggctgtctgaggcagatgggaattaagtggcaataccttcaaccgagcttcgctatcattagcgggggtgaatggtaccgacaccagatgctgagcctgatcggcatcatcctcttttttggccgaaacaaccgggcacacagcaaccggtgcatagccaacacttggacattggcgcaattgttcgagcgcgtcatggattccttctggagaaccgattactaccgtgggatagttgaattcgcccttcatacggttgcggtgcaaggcacggcgcatcgcccaacgctcggtgatgaccagtactagtgaaactagaggaacgaagatgtttaatgaccggggaagactgagatggaagaggtagcccaacgtgcatagcatgataaagtcaatgaacgctgcgttgagtagcttggcatacagggcgtaaccttcacccatggtatgccgttcgtaagtgcgtgcagcatatagactgatgagccaagaggcgcaagccagcgccaggaagctgaatatgccgtattctccaggacctatgcctcgcacgtatgcgtaggcggaaggacggaacaagaacacgattcctgaggccgcaatgatcgtcaacaggtcgagtgccaccagtgtggtgttgtaaatgtagcgccatttcggaatggaatagccggtgagatagtgagtgcccatattgtcgttgtgagtagagctaccgtccggagcagaagagaaataagtaccgtcaaagaatgtcggcgtgatggctgccgtatccaccggtgcagagaacgatgccgacgctcggctggcgctgatcctcacatgaggcattgacctggtgccagtaccattattttgcgtggatgatacaaatgctgtacctctatctttcgacatgatgtctaaattcttcctccgtgattcccctcaaccttcagaggaacaatgcccttgttctttcattcttctgcacaccctagcacgaatgctgctcatcccgcgttcgaacgcgtcctgaaaggggaacgcgccacccgcgacgcgacgctcgcgctcctcgaacggtacggcggccccgcgggcatgaaacgggccgggatcgaggacgtgaaggactgggccaggtccaacgggcttcgcgccggccgcatcatcgacgacatgttcaaggccatcggcgagcagaccgtcaccgtgcccggcaccggcatggccgaaaccatcatcccctccatcgcccgcgacatcaaggccatcaaggaccggcgtcgcgagatcggcacgcaggtcgaggccctgctggaggaccaccctcttctcacggtcctgacgtcgatgcccgggataggcgtcaggaccgcaagcaacatcctcctcggcatcggcggcgacatcgccaacttcaaaagcgcggcccacctggccgcctacgccggcatcgcaccggtcaccggccagtccggcaccggcatcaagggcgagagaccctccggacggggcaacaaacgcctcaagaacgcgctatggcaatcctcgttcgtcgccagcaccaaacacccgccgtccatcgcctactaccaacgcaaacgcgagcagggcaagcaccacaacgccgccgtcatccgcctcgcccgccgacgctgcgacgtgatctacagcatgctcaaaaacggcgtcctctaccaggaaccagccctcgtagcctgaaccgggccacacgggaaaggacgccggacgccaccggcagggcgaagcgcgcccacgacagccagccggaatcccgacacgtcaactccccaaggagttgacaaaaaacataggaacacctccacacaccaacacgacaccccacacaaagattgacaaaaacataggaacacccctctatcatgggccccctgaggacgtgcggaacgcttgtgttatatgcgcaggtcatctatgaccattactcggcatcagtgaaccattgcaggatgcgtgtgctttgtgttgcgtgtcgtaggcgaacagggattgtcatagagtggtgccagccggggcgttccgttgaccggttccaaaatcgcatagctcttgacatgagcgtatggcccggcatcgatagtgaaagttgtgcgttactgggggctgtttcgtttgtctcctcgggggtgccgtaggaaactgtgagagtgattccaagggcgttgcacaatgtcaggatacggccgatgctggcgttctcgattttgccctgttcgaattggttgatccaagggcggcttagcccggtgcgctcggataaatcagcttgggtgagtcccttgatgaaggcggttggaattgaaaaagtaaaaggtctccgactgaattcaccagccagagacctttctgattacaactgaggttgaggaaacctcggcagtcaggtccaacgaggcgaaagtcagtggcgccgcctagaagattgccccgaagctagcgcgacctttctgctagaacacagcataccagcatccatcgaaccttcccccgtacactggacagaccaaaccaaggaactactagcgtggcgtcttggcacggtgtcattgtgccagcaggcatagtgactggttacaactaaagaggaggttctcatggaaggcaatgaccatgacaaccgtccgagatctgaccggcaataccgggaaggcctgatgacgggcctgttgatcgctctggccaaccaagttggacagggatggtcgacggctatcatcatcgccacactggtgttgcttggtctgagcctcaggcgaggccgctgattcgtcagcggaatagccggaacccttgacgggttccggcccctcgtcttcactatgactcatagtttaatgcagctgtatatgcttgtgggctttgcgctgggggaggctggagcgtgtgggttcggcgtcgatgtcgacggtgacgcggccacggttggtcaggtcgcgcaggtcggcaatcgcttgcagattagtgctggccttggcgttggctgccgttctcttttgctgctccatgctgtggatgaagagggccgcgttgttgacgaagcattttgcgccggtgaaggtcgtcttgatgctaatggccttccacgtgctgagggtgatgaaaccggagagattgataatcgcagggctacttgagacgcgcaccatggtggtgtgcgtgtgcagaagctgctgcacatgtatcgtctactgtactgctgccaattggtttgcggcgatgatttcggcgaaatccacggcggcccgcttgggtcggcgatccaaaatgttctcgtcgggattcgccgtcgtgatcgcgatgttaatgccatacgtgatgatggagtgtggctttccgctgctgcccttttcgacgctggatgcagcagatgacttgtccgtctcggtctcggccataacatgccgtccgcgttcgtactggtcatgtgcgtatgcaggcatccgaaccactgtcctccctgaaaatccgttgttctcaggttatatcacgccttgtctgacgatgaaataccgagcatggactgtgcaaacaaaaggacgccaaccttcacggttgacgtccccttggccctaccggcaagaatgcatccagttcgatgtgtcgaatcaggcggcctttttgcgaccgcggcgcttcatggtgccagcggtggcattggccacatcgaaaatcacggtcttgctttcggggtaggcggtaccgttgacggactggtaggcgatttcaccttccggagtctcgggcagagtgaagtatgccttcactgcttcaatgagcgtggcttccttgacgcttaccgaagcggcctgcttgccttcgggcttgctgaacttaatggcgttgtcggccttggcggtggtcggggtcacggcgatctgcttggtcttgtcgttaatcagcaccttgacgtacgccgggaatccgagcacttcagcggtggctttgttgaaacgaatggcggaatcggtaacggtcagaacggtcttgcccaccggcttgaccagctgaacctcttcgaatccctgaagcaatgaagccataattgctctccttattgcattggttacgtgtttttatttacgtcactaattgtaaccagctaatttcgcattatacaaatcatatgcatgcatgattgaagaacatttgacctacgtattccgctccccgaatagtaccgatttaaccaataccaagaaaagaggaaacaagagcccgcaatatcagccgtattgaatatagaaatatgcaatttcaacatcgcaataactgacggcctttttgctggctctattcgccgatattgcattcaggccacagcaccgagcataatatcgacgccgtgcttgatttccgcatacacgcgttcaaacacctcgcgtgattgacgatgagggtcttcggtttcgagtgccgtaggcaaaaacggccgcagcataggtacgcaatccatgatttcgatgagcttgtctgcggcggtatcgccggcaatcggaccctcagcatgcatatgtttgcaagcgttcacgaagtcattgaacagaaatactttgcgaatagccagtggattctgctcaagcaaatcggaaatttgctcacgctcaaaacacagaatcaggtcggcttgccggctgatatcggtggtgagaggggtggaagaatgggaattcgcgtcaatgccgtcgttcttcagcaaatcgataaccatcggatcagcgggatgcaggggatagtgcagagtacccgcgctgcgcacggtgatattgccgctctgcaagccaattcctcggtcgacaagcttggctcgggtgtagtattcggccatcacggaacggcattgattgccggtgcatacatacatgatttgcataacaacgtcccttctcaagtgttgtgagcattccctcatatattccagtgagcattcctcgcgaatatgcgtgcgttatgtaccgtagcaataagataacgtccgattttttgggccctattgctgttttcgtgggtggcggttcgtcgttgagtcgttggggggcgtttttttgggtgggatgttcatcgaccaagaaaaacgtactacccggcggcaggcgcctgatgaacggcatattcaaacagcttctcaacgtcaaaggcacggtggtcgaggatgtgcggatcacggattcgccgctgcgttccggacccgtgctcgagatccgcgtgcgtccacgcgggggcatgctccgatgctcccgctgcggcaggaagcgccgcggttacgaccgtggcggcggccgtcgtcgttagcgtcatcaggatttcggctgctggaggtcgaaccggtcgccgacatgcctgtgttttagcaagttggcgtccgctttgtgagcggtgtttttccgcagtgtaggcagcgggttttccgcagggtgtgcggtatcggccgctgcctgtctgcgttgtgttggttatttggtcatgagggcgtgttcgcttcggtaggagcggccctcgaatctgatgagccgtccgtggtggacggtgcggtcgatgagggcggcggccatgttcttgtcgccgagcacgcgtccccatccgctgaattcgatgttggtggtgtagatgatgctccttgtctcgtaggaatcggaaatgatctggaagaggagcctgctgccctcctcgtctatgggcaggtagccgaactcgtcgatgatgagaagtcgggccttgccgatgctcgcgagttcccggtcgagccggttctcctgctgggcgcggcgcagacgcatgagcagtccggtcgcggtgaagaagcgcaccgggacgccccgctcgcaggcgagccgtccgatcgcgatggccaggtggctcttgccggtgccgacgggcccgtagagcacgaggtcctcgcatccggcgacgaagtcgaggttctcgagctgcgcgcgcccccagtcggcgggcatcttcaggttggtccagtcatagccgtcgagggtcttgtcggcggggaagccggcctgtttgagcaggcgcaggcgtttggatcgctcgcgcgagtcgagttcggccgtgaaccatcgttcgatgaagtcgagctggttgggcgtggcctcggcgagcgtgccggcgagcacgctgcgtgtcagggtcaggctgcggctcatcttcaggatgcgttcgcttttctcggtcgtggacgcgcgcctgcgtcgggtctccgggatcaccggatcgggtctgacgctcaccgttcttcccctccgtcgtccgtgccggtgatgaaccggtcgtagccgctcaggtcgggctcctcgatcccgccggggtattcccactcgccgtcgcgcatgcgcaacgcgatcggggtgagcgagtccgcgtgcaggcccatgtccctgttcgagcgcaggatctcgccgcacgcctgcatcgcgggatcgaacccggccgcccggcacgcgtccccgatcgctttgaggctctccctcaacgtcttttcgtccatggaatcaagccacgcgcgtatatcgtcgggcacgtccgggcggatcgagctttcccgccacgcgcggggtttgaccgcgagccggggaagcacgagcgcgggatcctccacattgcgcgaccgtccgtactgtctgggatattccgcgaggagctcgccggtggcgggcgatgcgagcgtgaccgtgtcccaccggatcgcggccagcaccttggaacgcgccgaatcggggccggcgaggtaccggttcgagtcgatgtcgaccagcccgtacttgtcggccgtccggctttcccagcgaaccgggtcgaacgccgtggacggcaacggcatcaacgcggccctctcctcgtcgaacacctcggccacgggcacgtccagcaacctcgggcaatacgagtccctggcgagcccgtcgcaccgctccagcaggagacggctcaactgccagtacgattccgcgcgcatgggcggcaccatgagattgcgccgcaaaaacccgaccgcgttctccacgctgcccttctcgttgcccgaatacgggttgcagaaccggacctcgagccggtaatgcgccacgaacgcggagaacaccccggtcaacgcgacctcgcccttcgcgttgcgccggccggcaccggtcgcgttgtccatcacgatcacgggaggaacacccccgatatgctcgaacacgagcatcaggccatggcacagacactccgcgttctcgcccggcaacgccacgcacaaccgcatgttcgaatacggcaacgagaccaccaggcaatgcacgtccgccatctcgccagcgatccgggcccgggccacgccgaaatcgacctgcatgctgcccgccgcccactcgagccgcacgtacccctcgcgatccggcacgccgcggttcgcctcgcgccaccggtgcacgtaacgcatcgtggtcgaatactcgccgtcgtagtccgtctccgccagcagacggtcgtgcacgcgcctgatcgtgtgccgctgcttcctgggcagcagacgatcggcctccagccacccgtccaccagatgcgcgtacgggtcgatcttcgacccgtacctgcgatccgccttcggcttgggcgagcaatcctccatatccgcgtacttcgcgaccgtcccgcgatccacatgcagacgacgcgctatctgcgcgcgcgacattccctgccggtcgagtctcctgatatcttgcacaatgggcatcggtatcgccatgttcctttccttcccgagcgccggccggcggcaaccggccgaatcaaaaccgattggcaactcgggaatatacaggccgcggcaccgatgcctctcacatcaccgggaaacgatgacgacaccggggaaaaccatcagcccacactgcggaaaaacactgccgaacctgtcgaacaaacattgaagcaaaacaacatgccgcgagtggaccgcccccggtgtggggccgtggtcacgatggtgccgtgggccgagccgggcagccggttcacgcgcgactccgagtcggagtgcacatggctgatgagcgtcgcgaaccggaagacggtcagcggcttcctgcacgtcgcgtggaggacggccggagacatcgtccgccgggtcgcggaccgcctcagggccgcgatgccctcgccgttcgacggcctggcggcgatcggcgtggataccgcaagggccacacgtatccgaccgtggtccgacgcacggaccccaagggccagctctaccgttcatggcggctcgaggaaccgctgcgcctgctcgggctcctccctcgaccgggccgggggagagctgaaccgctgggtgttccgggcctcgcatagccgcatccccgagatcgtcgagctttccaaaaaaaatcaggagacgccgccccgacatcccacgcaccatcgaaccgggctgctccaacgccaggctcgaggcgttcgacaacaggatcaaggccaccatccgcatggcctacggcttccaccgcgtcaccaacctcatcgccctgatcatgctccgatgcagcggactcgacatccgactaccacaacccacaatctaacccacaaaaacagcagaagcctctcaagtatccaacttttcgtccgcacccccacaaggttctaatcaggcattacagaaagcgcgtcaccggttccgagaggagtcggcggcgcgctttcataagggcacacaatcccaagatcacacccacagatcaataccgatcagtactcgtacgtgatcgcggggtcgccgatggtcggcgtctgatccagtttgaggttggctgagctggccgcggtggtcacgtcgtattcgatggtcaccgtgtcctgaggcgccagggagatgtcgtccatgtaggtcatatggtccttggcctgcacctgcgcgaaggaactgccgttcgacgccgacacattgctgacctcgcctccggccggcgtgtagatgaccacgcggttcaccgccacgcctcccttggcgttcgccgtgatgtattccggcagggatccggcctcgcccggctgcagggtgttggtgaacgaatacgtaacgtggtaggtgttgtcgccggtcctcttcaccgtcgacttgcgctggatgtaccagtccatcttcgaggcctgcatctcgttgaggtagacgccggccaccgggttcttcgcgtcgttggtgatctcgccggtgacgccggcgctgcgcagcaccgcctgatcctcctcgtggaacgaccagaagtacaggtgccgctgctcggtcatccggagcatcgtcttggcgacggtcatgagcttctgcgtgttcatgtcgctgaacaggtgggcgaccacctgggcggcggtctcgctgaagtactggtcctgagcggagggcgccagttccttgtaggcgccgttgagcaggaattcggcggtgttcgacccgttgagcacgcgcccgtcggacagggtcacgtcgccggtggcgccgatcatcgcctgcagcgcgacggggtcgagcgacatcacgccgtcggacgatccgccgaacggagccgcctgccagaacttctgggccatggacgcgacgcgcgggaagtccggcgtggacgaaagattatggacgcattgaccgaagtacagtccgctgtacagcgtgccgtcaccgtcctggttgacgtcatccaacgcggcgttggaggggaactcggcatccgcgtggaactcccccaccgcgatcttgccattgtccgcgctgaaggaaccggccgaaccgatcaggccgccggtgccgcggatctcggaattcgtctgggccagcagcacgtagttgcgggcgccgttcgcaccgaggaagttcggcagcatgttgagcatgccgctcaggttttcggtcacctgcgccagggcggccatctgcgtcttgccgttctgcagcgcgttgttcaccacgccgagtttggcgtcgggaagatcctggatcgtcctggcctgcgattgcacggactggtcgaccgtggcaagctgctgcgccgcggcgatgatcggctccatgtcgagctgcccatcgccactggagagactggcaccggtcagtgtggtgacgaccttgcccagctggggcagcgtggtctgcgcgaagtcatcgatggtaccgatggcggtgcgcgccgtcttcacgtcaccgccgaccacgggcatcttctccgccagcgtccacagaccgccgctgacatcctgcttggcggcggccgcctccttctggatgtggctcacgtcggacagcgccttgaccatgtcgtcggtggaaccgtccttgatgaccttggccgcgttgacaacattgttgaggtgcgctttggcgctcatcgccgacttgtacagtttgaatccgctgaagccggccgccgcggcgcacacgaccagcaacagcagcacgacgagcagcgcgttgcgaacgcgatgggttttcctggtgaccgtgcgtgcgtgtgatggcatgggctacttccttacgttatgacatatatcgatactggctggctgcccgattacgctttcgctggacgggtagcccggcggacggcacgtagcagtgcacgacgtgcacatcgcgtatgatgccgggggtgtcagcgcggctgactggggtggccgcggaccggatggagcaccggcaccgccggcgtcgtacaggtccgtggggaacgtgatcggaggaatgtcccagaacgtatcgacgatgtcgtgattggcaacgggaatcgccgtgcccgccggttcggacggggcaccggaacgccgctcatcgcctccgtgggttgcgcatcgcccggttgggcaggcccggacaccggagactgcaccatcgtgggctgatccgcgacactgttatgcgacgccggagccgttggcgtcgtattcttttccggctggccacccgttcccatgagctggcatgcacctttcagcgagtatttctcctaccgcatgccagtctacccatgcccgcgggataacccaaaaagccctgcaagaataccgatctttgaggcttctgatgtttttgtgggttagattgtgggttgtggtagtcggatgtcgagtccgctgcatcggagcatgatcagggcgatgaggttggtgacgcggtggaagccgtaggccatgcggatggtggccttgatcctgttgtcgaacgcctcgagcctggcgttggagcagcccggttcgatggtgcgtgggatgtcggggcggcgtctcctgattttttttggaaagctcgacgatctcggggatgcggctatgcgaggcccggaacacccagcggttcagctctcccccggcccggtcgaggggagagcccgagcaggcgcagcggttcctcgagccgccatgaacggtagagctggcccttggggtccgtgcgtcgcgggctttcgaggtgcgctgccggctccagcgcgaacggacgggacggcgcggcaccaaggacgctctacaagggcaggaggatcctgctcaagaccgcgtccctgcgcaccgacaggcagaaggcgcgcgccgacgatctgctcaccgaccccgcgaacaagccgctcgccctcgcgcacggcgcgtaccagaagatcatctcctgctacgcgcacgaggaccggcgcaaggggcggggcatgatggccgagctcatcgaatccctcgccgtcaaaagcggtgcgcccggatgccccgaactcgccacgctcggacgcaccctcaaacgccgcatgggcgacgtgttcgcgttcttcgaccaccccaacggcgcgaacggccccaccgaggccatcaacggcaggctcgagaccctcagggacatagccctcggcttccgcaacctcgacaactacatcaccagaagcctgctccacaccggaggcttcagacaagccatccaaacccacctctaaccacacgccatacacaccaaaatgcgaagagccacataaccaaagagcctctgccgggaatcaaccggcagaggctctttgcatagagaataatcgcaatcagtaattgttatgagcgatccagtagttgtacgctgcgacgatgccgccgtagcgctgctcgcagtagctgatgaaccacttgaactgggtcttgtagttggtctgccagtccgcaccggcggaagccatcttgctaccggggtaggcctgacccaagccataagcaccagacgtggggttggtggcggtggggctccaaccggactcgtggttgatgatgtagttcgcagcggtgaagtccgcttcgctatacccgttgtccaacagatactgatgcgcccaggactgcacttctccagccggaacagtggtgccgagatcggccgacgacgatgacttggtggaaccagtgcccaccaggatcaccttatccaccggggccttcttgacccatgaggcgaatacgttagaagagacgaccttgtcgccggctcgcttgaccagcgaggtggtctccataatgcccttctggccctcggtctcgaccttttcctgacccttgggcaggctgctggtctccttgcgcacttcattgaaggcgatctcggtatcgttggtctccacatcggcatccgcgcgattaatggtgaccacggtggcctcggtgaccttggatttcagcgagggagatacggcatcatccgggtcaagcgtgatatcacccgtctccagcacgtccttgacggtggtcatgttggctttttcgccaagtactacgcgcgaatcgccattaatcttcaccgtaacgaacgtggtgttcttgtcggcgctgttgattgcgccacgagtggcagaacgggatgcggccgaatcggtggcggagaacgaagtgatggtggaaatcggcttcacatcatcagcatggtagaaactgcgcgacaccaatcccgccgcgccgagcagacctgccgcggccaccacagccgcgatcttcatccactggcgcttgttcaacggtctgagcatacgggtcggcttggcatgtctcgtcattgcgctccttgatcggatttcacactgcccaccatgataggcggcgcagtggatgaaggaaaatcaggctcaggcctgctggtcggcaccggactgggcggccttggcggcggccagatcgagtgccttggcctgggcgatcagatcgtcgagatcggcggcctgcagcgcgccggcctgctggaagatgacctcgccctgcttggcgatcatcagtgtgggcaccgcctggatgccggcggcctgggccagatcctggttggcgtcgatatcaaccttgacgaaggcgatgttcgcgttctccggctcgttggaggccgcctcgaaaatcgggccgaacgcgcggcacgggccgcaccaggtggcccagaagtcaacgaacacgatttcgttgtcggtgatggtcttctcgaaatcggcggaggtgatggcggtggttgccatgatgttcccttcttttgtgttttccttggcatcgccgtacggccctcatgcgtggccgccgggcgattgccttattcatgcaatacgtcttggcgcttggggccgtgcggttcgtggccgtcggcttcctgctggctaccagcttcccagcaccacccaacatttgtgtcgtattttccgccgccggccaaacgtttcccaagatttcgccgtaaggtgacgcgtggcgtgattttgcgcgcaataatgggatgcatgccagtcatgaatgatgaagtgcccgacgagggcgattatgatgccggccgtggccgcggcgaattcgacaacatcacgcccgaggacttcatccacggaggcggttccggtcacggcaacccgccgggctggctggggccgtccgacatcaaccgggcgcgccatcagatgcccatcgcgtatgtggagatcgtgcccgtacgcaccgatgagatgggccgcatctcccaggtgggctcgctgctgcgcgtatccgaggacgggtcgatcgagcgtacgctgatcaccggccgtgtgctgtaccacgagacgttgcgcgaggccatcgcccgcaatgtggccaaggatttgggcgatatcgccttgccgctgctgccgatcgggctccagccgttcaccgtggccgaattcttccccacgccgggactaagcgaatactacgatccgcgccagcacgccatcgcactgtgctacgtggtgcctatcgccggcgactgcaagccgcaggatgaaacgctggatgtggaatgggtggatcccaagagcgacgtaatggacacgttcgtggcgcagatggtcaacggccatgggcgcatcgtgcggcaggcgttggcctgggccggaatctgacagttgttttgccttccgttggaggggatggcgcgtagcgacggagggcggtccgcgttgagaccgctcccagccgactgtgccgacagctccgccagtggggcgcgaatgtgaaggagtaattcatggcaatcgaattggccaatcatatctaccgcgacggcgaaggcgtgccggtggtgctgatgaacgcctacccggtggaccaccgcatgtgggacgtgtgcgcgaaggcgctcgccgacttcgccgacctgaacgacgtgccggacttcccgatctgggctccggacatggccggctccggcgcatccccggtgccgagcgacgccgattcgggcccccgcatggcgaacggcgcgtacagcgaggcgttggatcgcctggccggagcctacgtggacctgatcaaggcctccggctatgagcaggcgatttgggtcgggctgtcgatgggcggctacgtggcgatggacatccagcgcctgtaccccgaaacggtggccggactggccttgtgcgacacgatggccgcgtccgacggcgtgggcggagagaaccgactgaagatggcggacgccgccgaacagacgaactcggtcgaaccggtgatgcacttcgcgcagccggccgatggcgattccaccgtcaagaagactcctgaattcatcgcgaccatgaccggctggatcaacgaacagaacccggctggtctggcttggcgtcagcgcatgacctacggacggcctgaactgggggcggtgccggaaacgatcagcgcaccgagcctggtggtatccggcgaactggacccctccagcaatccgagtgtgatgcggccgctcgccgaacgaatcaccggcgctgaattcatcgatattccggactgcggccatttcagtgccgtcgaacatccggataccgtggcgcgagcactgctctcgctcgtcaagcgcgtgcagagcgcgcagaagaacgcataggagacttcgatgaccgctgacattcatttctcgcctctggcactgacccatgcgctgccgttcctgccgctcgcacaaggtgacatcgactatcaggtggaccggcgcagcgaacccggcctgatcgacgagctgctggccgagccgaccaccaaagtcgtgcttacgcgcggcggactcgtcgccgtaccgcgcggccaaggcgagctcgtggactatgagaacgtgaaaatgcggctcgccacgttgccgggcgcctatgtgtccgccgaactggcacgctaccccgaagcggtcgccatgttcctcggctcctatgtcggggcgcgcggcgaatccgtggtcgccgtggatatcacgcgcgtgccggaagccggcgttcccggtgttggcgggattgccggtgttggcggtgccgtcggcggcgtgctcggcacccaggattccggcactgtggacggcgcgctgggcaagaacggcatcagcggaggtgctgccgccggaatacggcagccgggaaacgccaagggtaatggcggcgtagccgcagccaaaatcgccgggccgctcggtgtaccggattcggccgggcaaggtgcggacgatgccttcgatgattcggtcggcgcgtccgtacagcccttggccccgaaacccacgctgctgcaacaggccgtgacccggttcgactgggtggacctgcgcggcttcgcccctcacgccaacgcgcgcgaggccgggcaagccaccagtgccatcaccttaagcatctggcacagccgtcagcggttctgccccacctgtggcgcggcggtccggccggcgctcgccggatgggcgcagcggtgcaccaacgaggcggacggcaaccgtgtgctgttcccacgcgtggagccggcggtcattaccgccatcgtggacgggcacgaccgtctgctgctgcaacacaacgcggcatggaaggattcgaggctgtattcggtgtccgccggatttgtggaggcgggggagaaccttgaacacgcctgccgccgcgaggccatggaagagaccggcatcaagcttggcgaggtgcggtacctgggttcgcagccgtggccgttcccggcttcgctgatgatggcgttcaaggcacatgcgatcaccaccgacgtgcgtgtggatggcgaggagaccatgaccgcgcgatgggtcacacgcgacgaatacacggccgagctcatcgccggccgtatggcggcgccgggccgcgccaccatcgcccgctacatgattgaggaatggctcggtcgcgagctgtgacggaccgcgaagataggttaggcttatgactatgagtgatgacaacgaaaacgaacagccgctgaatctcgacattcccgaccatctcgaatactccgaggagcatgcgtgggtggaccgttcggtcgaccccgcaatcatcggcatcaccgaatacgccgccgaccagcttggcgaacttgtgttcgtggatctgcctgagcctggcgcccgtgtggaggccggcgacgagatcgtggagcttgaatcctccaaggccgtccagccgctgatcagccccgtggcgggcacggtcaagtatgtgaaccgtgacgtggcggacgacccgtccgtggtcaacggcgatccgtacggcgaaggctggctgctgaaggtcgagcttgacgacgatgagccggagctgctgagcgccgacgaatacgcgaaggtcgtgcggtagttccttttgagctcccctctctgaggggagccaagaaaaatgaggcgtatggcctatattggtgtctatgagaagcccacgcgaggattttgaggcggcaggcaagcgactgccttgggatgctgctgctcgcaatgcagcgctgtccgccaccgcgccagtctctgacgtcaaggcatccgccaatggcgccgacaatgccagcaatgctgaacattccgatgacatgcccaccgtgccgattcccgcacgcaaggctgccacgacgttcgacaccccctccaagcgtgagcgcatcgaggtcaagccgccgatcacccgattcatacgtcgtgccgtcacccgcgtgttcggtgtatggtcacgcatctccactcaggtggtgcgccaatgggactggtatccgcgagtggaaccctatgtgggttatggtaccggcgattactcgcgtctgatctgccgcacggtatacgcccccaagcacgcgcaatccggcgaactgatccgcggcatccgcggcatgcttgccatacccgcgccgcgcacccacgtgcaggccagcattgatgacatgccgctcaacaccgtgcagatcggcgtctccgaggtctatgacaaggtggaccgcacgcgcgatctcggcagcgaatacgccatctccgattccgccggatatctcgacctcgtggccgagcatcgtctggtgcccggcatccatcgcgtctcctacagcgtggccaaccgcaaacccgtgagcgccaacctgtacaccatccccgccagtgccaaagtcggcatcatctccgatgtggacgacaccatcatgatcacgcaggccccggtgccatggaaggccgcgtacaacctgctgttcctcaaccccaagaagaaagcctccgtgccgggcatgagcgtgctgttcacccgcatcgccgacttgttccccggcgcaccgttcttctatctttcgacatcgccctggaatgtggagagttcgattcgcaacttcatcactgaccatggttttcccgaaggcccgctgctgctgcgcgacctcgacccgaggcccaagaccttcgtacccaccggcccccagcacaaacttgagtttgccgaacaacttatggccgacttcccagacatgaagttcattctggtgggcgatgacgggcagaaagacccgaccacgtacgccaccatcgcccgcagatatcccggacgtgtactggcgatcgtcattcgtgagttgagcccgcgcgaatcaaccggattggcgtcggtgacggggctcacctcgacccagccgactccggtaaccgatgtgccagtattcaccggcaccaccggctcgaacattctgaagaccatgctgccgtatctgaagacggtgttgcgataggcgcggcgtgatgaacactgaatgcgtcccggtgcggtgcctcgcctataatcgcgtggtatgactgacgagagcacaaacgccgcggccgcgatgccgccttacgccaagcgcgagccgaagcgccgcgaattccacggtgacgttttcgaagacgattacgagtggatgcgagacaaagactccgatgacgtgcgcagctacgtagctgccgaaaaccagtactgcgagcgtcgcatggcgcatctggcggatttccggcatacgttgtttgaagagctgaaatcgcatgtggaagagaccgatatgtcggttcctacgcgcatcaacgattactggtacttcacccgcacgcagcagggcaaacagtacggcgtgcaatgccgcatccccgtgcgcgatgccgacgactgggacccgccggtcgtggatccgcaaggcgcgcccggctccatgcccggcgaacagatcgtttttgatgcgaacaaggaatccgaggggcatgacttcttccggctcggtggcttggatctgagcaaggacggccgttggatgctgtacggcgtggatgttgcgggagacgagcgatatgatttccgcattcgcgaccttgccgggctggagaccggggagccggtcagcgaactgcccgaacagttcaccggcattggcagcgcatgcttcacgccggacggccaatgggtgttctgggtggaattggacgattcctggcggccgctcgctgtgtggcggcatcgtgttggcacggcggtcgaatcggatgtgtgcgtgtaccgagaaaccgatgaacggttctgggtgggcgttggcatcagttttgatgagcgcaatatcgtgatcggcaccggttccaaaaccaccaccgaagtgctgatgctgccggtggccacgcctgaaggcgaattccaagctttcattccgcgtcagaacgatattgaatatgatgtgagctttgcctgttttgaaggcgcgggggagaacggtgcggatgtgccactcgccgtggtctaccacaacgccgccaatccgaatttcgaaatcgacgtcattgacatgcgcggccatgagccgccgtaccgactcggcgaaggcgtgtgcattgccgccgggtcgccgtacggctgtgaacatggtgagccggataagccgattaccgaggcatacttcaacgccgccaatccggcgatattgcagggtgcccacggtctgggcatcgaaggcatcgcgttgcatcgcaactttgtgtccctgagctaccgtgccgacggccagccgcacgtggcatacatgaccaagagcgcggctgccgccgacttcctggccggacggccgtggcggtttacggaattgctgccgcctgccctggaggacgactgggacatggttgccgacgatcgcgaaaacttcaccggcgatcatggcgaaatcttgtggaccgaagatgaggcccccacggatcacacgtcatcttccgatggtgctagcgacgaccacctgcccggtgagacccggcgcttgtacaccatcggcgtcggcggcaacccctcgtatgaggcgccgcgcatgcgctactcgttcgccagctacacccgcccgggcgagttgcacgaaatcgatcccgccaccggtgaagatgcgctgctgaagcgagccatcgtgttgggcaacttcaatccacgcgattacatggaacgccgtgtgtggattaccgcgcgcgacggcgaacgcattcctgtttccctcgtctggcaccgcgattgcccggcgcaggattcgccgatgttcattaccggatatggtgcatacgagatttcctccgatccggggttctcggtctctcgtctgagcatgttggatcgcggtgtgctgtacgccgtgccgcatattcgtggcggcggcgaaatgggacgcgcctggtatgagcaggggcgcagactgaacaagaagcattcctttgaggacttcgtggacgccacacgcgcgctgcagaaggcgcatttggctgatgcttggcgcaccgtggccaacggcggatccgctggcggcctgctgatgggcgcgattgccaatatggcgcccgaatgctacgccggtgttgaggcggatgtgccgttcgtggacgcgttgacctccattcttgacccggacttgccgttgaccgtcaccgaatgggacgaatggggagacccgttgcatgaccctgaggtgtatcagtacatgaagtcgtacacgccatacgagaatgtgccggtcgccgtgctcgagggcggcaacgacgaggctgccggtgacggcagtgctgatggggctgccaccggcgcggtcgccgccgcgcaattcccgagaatcttcattaccacctcgatgaacgacacccgcgtgctgtacgtcgagccgctcaaatggctggcccgtctgcagtccgccggcgtggacgcggtggccaagattgaggtcgaggccggtcacggcggtctatccgggcgttacaagcaatgggaagaggtttcctatgagaacgcttggtgcatggatgtgatggggctcgctcattaggccatgtccactagctgagcgggttcgggccggcaggtgatagcgcgagtaggctccttgaactatggcaaagacatataaaatcgccgttattcccggcgacggtattggcaaggaagtcactccgtgggctcagaaggctttggaaaaggccgctgaaggcgtagctgacttcgagtacgagaacttcgacttgggtgccgagcgctatctgcgcgatggtgcgatcctgcccgaggacgaagaggagcgcatcaaggccaacgacgcgattctgcttggtgccgtgggcgatccgcgcatcaaggccggcattctggaacgcggcctgctgctcaagctccgcttcgacctcgaccagtacgtgaacctgcgtccctccaagctgtacaagggcgtcacctcgccgctcgccaaccccggcgacatcgacttcgtggtggtgcgtgaaggcaccgaaggtctgtactgcggtgccggcggcgcggtgcgccgcaacaccccgcaggaggtggccaccgaggtgtccatcaacaccgcatacggtgtggagcgtgtggtgcgttacgccttcaagctcgctatgaagcgcaagaagcacgtcaccctggtgcacaagaagaacgtgctcgtcaacgccggtgatatgtggcagcgcatcgtcgacaaggtcggcgaggaataccctgaggtcacccacgactaccagcacatcgatgcggccaccatcttcctggtctccgacccgagccgtttcgatgtgattctcaccgacaacctctttggcgacattctgaccgatgaggccggctccgtggtgggcggcgtgggctactccgcctccggctgcatcaacgcctccgacgagttcccgtccatgttcgagccgattcacggttccgctccggacatcgccggtcagaacaaggccaacccgaccgccgccatcctctccgccgccatgctgctcgagcatctcggctttgatgatgcggccaagaagatccataccgccgtcgaagcggacatcgaggagctcggctccaccgtgcgctccaccgaccaggtcggcaaggacattctggcccgcatgtgacctcaaacctggctcccctcgctgaggggagccagaaaactctctatactgagttgcatgcaaatgcgacatggggaatgcaaaaccgttggcagcaaactagtcgccgtgaccgtatccgtcgatgatgacggcaccgcacagtcatgccatatcagtggtgatttctttattgaatcagtttcggatgccgaatcccatgctttgttgcatgacctggaacgagctctaattagcgatgattcattgcggtccgtattggacgctcaccctagttgccaaattatcggcacagatgaaattgccatcaaaaccgcatacagccgagccgtaagcagcaacttgcccccgctggcgggggctccagcgcagcgggtgggggtgggcagccccgatgcgccgaacatcccagcatccatcaatgcacaaaccaagcagcccgacaaaagctctgaataccgggagcgctggaacgccctcaagcctcaactcaccgtgatccacgaccatccgcgtactccggacgagcaaatggccattgacgagacctgggcgcgtgaagtcgcagcaggaacacgacagccgaccatccgattatgggagtgggcgggcccggctgtggtcatcggccgtttccaatcggcccaggacgaggtgaatctggacattgccaagcagctcggcttcgacgtggtacgccgttgcacgggtggcggagcgatgtttatcgaaccgggcaacaccattacctattctctgtatgcgccgctcgatttcgttcagggcgtaagcatcgaagaatcctaccggctctgtgactggtggctggtcgaagcgctgcgcgaacttggcttggatgtgcggttcgcgggcctcaatgatatcgcctcgcagtacggcaagatcgggggagcggcgcagcggcgcttccccgtaggctcaggcggcgcggtgctgcaccatgtgaccatggcgtatgacatcgatgcggccaagatgagccgtgtgctcaacaccagtcgcgagaagatgtcagacaaagcggtgaaatcagcggtcaaacgcgtggacccgatgaaaagccagacgggtctcagccgcgaacacatcgtcgagcaccttattgactggtttgcggcgtgatttcaccgatggccgtatacgattttgccggtggccgtgcgcggttttgtcatgggcgagcgcggtaaccgcgacagtgccgtttttcgcggtaacgcattcgtcagcatgtcgtacggctatcggatcgtgccacacatgaagtgacgaatgagggcatgctcctgacgaaacctgtggggcgcgttacaatatgacggatgggcgacgacggtcataggacaataaggatggtgcgatgagcttggaaacgccaaacgcttttgctgacgaggaaaacatcctgttgcatacggcattgttcaagcaggtatcgccagccgaagccgaggagctgttgccgcatttgaagcatgcgacgttcgataaaggcgactatatcttctccgaaggcgataccgatcagcgcatgtatttactggagcaggggcgcgtcaagctgattcgcacttcttccgatgaccgcgtgcagctgctgtccatccacgcgccgggcgaagtgcttggcgagattccggtattcgaccctcatggtggcccgcgcaccgcgtctgcggtgtccatgagccatggcacgcgcgtggtctggctggagcatgatgccctgttcgcatggcttgatgagcatccgcgtgtggccatcgacatgttgcaggtcatggccaaccgccagcgcggcaacaacgaacgcatctccgacttggtattcatggatgtgccggcgcgtctggccaagacattgctcaacttgggctcacgtttcggcgagccggtggaacagggcctcaaagtgccgcatgacctgactcaggaagagctggcccaactggtgggctccagtcgtgagaccgtgaacaaggcgttgatggacttttccaaccgcggatggatcgcacgtgacggccgatcgatcatcatcttccagcccggtatgctgattcgacgctcgcggcgctgaccgttcggctgacttccagccaatgttacgctagtgcgattcttgtgatgatatgttcacgggagctgaccgtaagcccggttggtagggcaccccatttagaatggggcccatgcccaaaaagaagtccctcactctccaacgtgtgcttgttctcctcttggcctatatcatgcttgccgtctgcggcggcgtggcggccagcgtgttgtttgtaccgggtgtggtcggtgccaataaggccgccaaagcggtgattccgtcgctcaaggtagaaaacgtggacttcgacgtgactagtctgccccagaagtcgacgatgtacgcgcgagacggttccaccgttatcgcgacgttctacaaccaaaaccgtatcgtcgtgccgctgaagaagatttccaaaaccatgcagcaggcagtggtggcgcgcgaagaccgtcgattctggactcacgccggcgtcgatgtgcaaggcgtgatgcgtgcgttcgtgcagacctacctcgtcaaaggctcccagcagggtggttcgtcgctgacccagcagtacgtcaagaacgtgctgctgatgcaggcgatcgaggatgacgattcgatcgcccagtaccatgccactgaagacaccatcgcccgtaagattcgcgagatgctgatttccgtgcagatggaaaagaagtattccaaggccgagattctgcagggctatttgaacatcgcccagttcggcaacaacctgtatggcgtggaaaccgcggcccagcgctacttcagcgtgtccgccgccgatttgaacgtggtgcagtccgccaccatcgcggctatcaccaagaacccaagcctgtacgatccgctggtcgaagagaaccagaaggaaagcgaaaaccaacgcaatatcgtgctcaagctgatgctgcaggaaggatacatcacccaggaccagtacaccgaagctgtgaacacgccgttgaaggacacgctgaaagtacaggacgtgaatgtcggctgtcaggacactggcgattacgcgtacttctgcgattttgtggtgcatcgcatccagaactccgaagaattcggcaagactcgtgccgagcgtaacaagctgctgcaggagggtggcctgaaaatcgtcaccacgctggatgtggaagcgaattccacgatgatggagaccgcgcgtaataccattccaccggacgatcccagcggcatggagatagccatggccgcagtcaaaccgggaaccggcgaagtgctgagctttggcctgaatcgttactatgacgccactccggcagccgcgaacgatcccaccaggacgagccagaactatgccgtcgatttggcggatggcggtggttctggttggaccatcggttcgtcctggaagccgatcaacctgattgcgtggatggaagcgggccattccatcaacgacaacctccagacctcgacgtcataccccactacggacttcgcctgcagtaactattcgggcggtgccgattcgtggaacgtgtcgaacgccatgggcgcaggtacagtgaacccggaaagcccattcctcggtctggtccgttcgcataacactactcaggcttccatgggtgccatcctcaaactgtgcaaggtggcggacaccgcgactgaactgggataccatgacgccgccacgggtgagaccatcgacaaaacccaggtgtatacaccatccatgatgatcggctcggtgaatgtgtccccgctgaccatggcgagcatcttcgccgtatacgcctcgaatggtgtgcaatgcaacccgattgccatcagcaaggtgaccgataaggacggcaacgatctcaaggttccatccgcgaactgccatcaggcggtggataaggacatcatccaaacactcgcttataccctgaaccaaggtacggtgcggccggatggtgccggttggtcattcagattggctgacgggcgtaagtcgtttggtaagaccggtaccagtgaggatcttgcggtgtccggtggatcgttcattcctaatcagattgcggcgttcgctgtggtcggcgatgcacagaacccgtacaccaaccgtatttccaacattgccatcaacggccggtacaacagctattgggatggttcgacaatcgcggctccggccgttaccaacttcttcaatagctacatttccaagaagaaaataccgattgacaacgattacggccagcccgtctcgaagtacaccacgactggcaagtatctgggcattggcggacgaacgttcagcgtgccgcagaccactacgaatggcaacagccaatcgcagagcagcaacaatcagtctcagtcgcagaacactgggcaaaacaacacccaaacccagggcaccaattcagagcagtcgaatgatggccagtgattggtgattggcgtttgacatttggtgattgcatgccggctgagtctgcgtagcatggccgactgcgatacccaaattacgtagtttgcgggcgttacctgtttcaggtgacgcccgttttacaatacttaatgacaacgccatcgcgttcatcgaatatttgccatgaacgtgcatcggaaaggggaacgatgagcaacgacgatctgacgcatgagaattttgattttcgtggattcgacgtgccggatctcaaagcggtgacgctggcttcgtcttcggacggcgatcagtccaagcagccgaagaccaagcacgaggatgcatcgaagaaccgtaagcacggtaagaagaagtcaaaatccgatgcacggtccaagaagcgggccggcgcgggcaagacgagcgaatcgttcgatgattatgaggaaagggaagctgtgagcaaggcagataagaaagtcagcaaggaccgtccggggctgtttgcgccaatgacgctgcgcgaggtgaccgtgcgtaatcgtatttggttgccgccgatgtgcacgtattcgtcgttcgcccgcgatggtaggcccacgccgttccactaccagcattacgtgtctcgcgcgttcggcggattcggcatggtgattgtcgaatccaccgccgtggctcctgaggggcgtatcacgccgtgcgatctgggcctgtgggaagacgggcagattgatgcttggcgctggatcgtggacggtattcgcgaggcgggtgcggtgcctgccatccagctcaaccatgcggggcgtaaggcttcgactggttgctttgccgttggttacgacggtcagaacgtgccggaggaggcgggcggctggcctaccatggcaccgtctgaaatcgcgttcggtgggttgcgtacgccgcgcgcgctgtccgtggatgagattcatggtctggtcggcgcgttcgccgtggcggcgggccgtgcggtggccgccggcttccaggcgattcagattcatgccgcgcatggctatctgatttctcagttccttgacccgctgagcaatgagcgtgatgacgaatatggtggcgatttgaccggtcgctctcggttcctggtcgaggttgtggatgccgtgcgtggggccgtccctgagggcgtgccggttctggtgcgcatttcggccacggattgggccgccggcggttgggatttggaccagaccatcgcactatccaaggtgctgaaggagcatggcgtcgatgtgatggacgtatccaccggcggcatcatgtcgggagtgtcgattccggtcaagccgaactatcaggtgccgttctccgagcaggtcaaggccaaggccgatattccggtgaccgcggtgggtcttatcaccaagccgaagcaggcggccaagattctggcccatggcgaagccgatgccgtggagattggccgcgccgcattgcgtgatccatactggccgttgcgtgcagccaacaagctgggcataccgtccaccgagatcccctacgccccgcaatacgtggccggtgcgtactaaatcctcatggggcggtaactttcccatagggcggtaactttcccatggggcggtaacccaaaacggcggtattctgcggaatgtgaaatttggctaaccgccccatgggacaatcaccgccccatgagggttttaccgccccatgggtaatagggcaatatgtgagttcactccacgtctacgccgacggcgtcggagacgtgctcgaatccgtcgcggcgcagcagctgggccagaccgcgtttcaacacggtaatctgctgcgggcctcggtacatcagcgagctgatgaacatgaccaagctggagccggaacgaatcttcgcataggcttgctcgggggtaaagacgccaccgatgccggcgatagcgaaccggtcgccatactctttatacaccttgcgaatcagctcggtgctggcgttggtgcacgggccgccggacaggccgccctcccaatcgcgcggaatctcgaggccggtgcggtccttctgcagattggcgatggacagcccctgcacattgtgctcggccagcacatcgagcagttccttgtactcgccccacggcttgttcaacggcatcttgaccaacgtgggctgcgggcggtcgatcttgtcgagcgccgtaaacagacggtcgagcgcttccggagtcgcggtgaacggttcgccgacgtgcgtgttcgggcaggagacgttgacctccaccatcgcggtgcggccggcggcgcggcgcattgaaatgcagtaatcctcaatgccttcgtccaaatcgccgcactggtcgtcgttggtgcgggcgatcgacacggacagctgcatctggcgggcctgagtccaagccttctcggcgcgctcgatgaccttgtccgaaccgatgttggcgaggccgacgtgcaccatcatcgaatcgtattcaggcagacggtggaaccacggcttggcgttgcccgggcagggacgcgaggtggtggagcctacggtttcgaagccgaagccggcatggtccagcaccacgggcatctcgcagttcttgtcgaggccggcggacaggccgaacgggttggtgaaatcgacgcccatcacattcgtttccagaatggggtcggtgtagtcgagcatcagctgttcggcgatcagcagcggcgggacgttcttgacgacgtggcagaactcgatcatctgatcgtgtgcctcatcggggcggtggttgaacacgaagttcggtttgatgatgtgcttgtagccgaaggtgaacagatcggtggtggctttgttgacggcgtcatgccagaagctttcagaaacgtaagtcataccgcctattgtctcacgcttgggccggtgcggctaggcgattcctacctaggcgaattggggaagggggctaccgctgtgagaatatcggttcgcgcaatgtgcgattttgcgcggttttgtggaaatgacacctgaattgcccggaattttcgagaaattgtccccaaaacgctcaagccggtttggtttgtgagcttttgtgtgcgataatgttcgcatgatttcgtcacaacgtcagcacctcatcttgagcaggttgcgcacacgcggggcagtgcgcattacggcgctatcgaaggaactgggtgtgtcggcgatgaccatccgccgcgatatcgccgaacttgccgacaagggactgttgaagcgcgtccatggcggcgcggtgactaccagtaccttgctcagcgaacccctgttctccgtcaagtctcagatggatatcggcctgaaggacgccatcgcccaggaagccatcaaatatgtggctcccggcgatgtaatcgccatcggcggcggcaccacggcctatgtcttcgcccagcatctgctcgaatcgcagcagtccagcggcatcaccatcctcaccaattcgattcccgtggccgaactggtccaggccctcgaatccaaggacgtggaggtgatcgtcaccggcggcgtgatcacccgatcgaactcgcttgtcggtccgatcgcggacaaggtcgtcgcctcgctgcgtgtcaacaccgtattcctcggcacccactcggtgtcgattccccgtggcttcctgatgccgaattcgctggaagccgcaaccgatatggcgatgatggacatcgccgatcgcaccatagttttgaccgatcacaccaagtggagctgcacatcgctgtcgctgtttgcgcgcttcgaccaggtgaacacggtcattactgacgacgggctcgaccccgactccgccgccaaaaccaaggatttggtaaaggaactcgtgctggcccaccagagcgagaccattgaggaaagtgagtaaacccatggctgatttcgccaactacacccccggggagtatgcgaaggagcatatccgcatcacgccggcgacgcttgccgacggtcgtgacttcttctacctggacgacgaccccgagttcgtctccggtgccaagacccgcgagctcaaggacccgcgcccgctggactaccgtttcgccccgcatctggacgccgacggtaacgaagtgccgtacgccgccccgcagatgcgccgcgacccgctgaccggcgactggatcccgatggccaccgcccgtatgaaccgcccgatcaccgccggccccggcgccaccgccaagggcaacccgctggccgcccgcaagcccggtgacccgtaccaggacggcgaagtgccggacaccgactacaacgtcgtggtgttcgagaaccgcttcccctcgatggtgcgcgtgcccggtgtctccgaggacgtgacctacgttgacggcaacccgctgtgggagaagaagctcgccgccggccgctgcgaagtcatctgcttcgacccgaacgaggacggcctgccggccgatttgccggtctcccgcctgcgcaccgtggttgaggcttgggccttccgtaccgccgaaatctccaagatggaaggcatcgagcagatcttcccgttcgagaaccacggccaggaaatcggcgtctccctcgcccacccgcacggccaggtctactgctacccgttcatcgccccgaagatggagaaggaactccagcacaccgaggcctaccacgagaagaccggtggcaacctgcttaaggacatcatgaacgccgagctcgaagccggcgaacgcatcgtgatgcgcaaccacagctgggtcgcctacgtgccggccgccgcccgttggccccttgaagtccacgtggccccggtgcgcgacgtgctcaccctcgaccagctcaacgacgaagagcgctgggaccttgcctccatgtactcgcacctcctgaagcgcggcaacgccttcttcgacaagggcgacggcaagggcatggacctgccgtacatcgctgcctggcaccaggccccgatccacgacaagcgccgcgagaactaccgcctgaacctgcagttcttctccttccgccgtgccgccaacaagatcaagtacctcgccggctccgaatccggcatggccgcctggatctccgacaccacgccggaactcatcgccaagcgcttccacgagctcggctccatcgacatcgccgactgatagaaagaaaacatcaatgactgctgttgaattcattgagccgctgacccatgaggaaggcgtttcgcaagctaccaagctgttcgtcgacacctacggcgctgcgcccgagggcgtgtgggctgctccgggccgcgtgaacctgatcggtgagcacaccgattacaacgccggtctgtgcctgccgattgctctgccgcaccgcaccttcatcgctctgaagccgcgcgaagacaccaaggttcgcgtcgtctccgacgtggctcccgacaaggttgccgaagctgatctcgatggcctcaaggcccgtggcgtggacggctggtccgcctacccgaccggcgtggcctgggcgctgcgtgaagccggcttcgacaaggtcaagggctttgacgccgctttcgtctcctgcgtgccgctgggctctggcctgagctcctccgccgccatgacctgctccaccgctctggctctggacgacgtgtacggccttggttacggcgattccgacgccggccgcgtgaccctcatcaacgctgccatcaagtccgagaacgagatggccggcgcttccaccggtggtcttgaccagagcgcctccatgcgttgcaccgaaggccacgcgctgctgctcgactgccgcccggagctcaccccgctggaaaacgtctcccagcaggagttcgatctcgacgagtacaacctcgaattgcttgtggtcgatacccaggctccgcaccagctcaacgatggtcagtacgctcagcgtcgcgccacctgcgagcaggccgcgaagatcctcggcgtggccaacctgcgcgtcaccgccgacggcatcgccaaggccgacgacccgttccaggcgctcaaggagacgctggacgcgctgccggacgagacgatgaagaagcgcgtgcgccatgtggtcaccgagatcgagcgcgtgcgctccttcgtgcgcgccttcgccaacggcgacatcgaggccgcgggccgcctgttcaacgcctctcatgattcgctggccgcggactacgaggtcactgtgcccgagctcgacgtggccgtggacgtggcccgcaagaacggtgcctacggtgcgcgtatgaccggcggcggcttcggcggctccatcatcgctctggtcgacaagggtcgttcccaggaagtcgctcagaagatcgccgacgaattcgaaaagcaaggcttccacgcaccgcgcgcgcttgccgcgtacgcggcgaaatccgcttcacgcgaggcatgataataaatcacaatgctaaatggcgggtgtcttccctatacttgggtagtcacccgctttttgtatacgaccagggagagccatgaacaaggcaatcatcaccgtcgtcggtcaggacaccgtcggcatcatcgcgcgagtctgcacctacctgtcccagcacaacgtcaacgtgctcgacatctcgcagaccatcatcgacggttacttcaacatgatgatgattgtcgactacgccaacgcggacaaggacttcggcgcgatggtcggcaaccttgaggacctcggcgacgacatcggcgtgcgcatccgctgccagcgtgaggaaatcttcaccaagatgcaccgtatttgaggcggcccgctcagcaggccgcctcacgcgaggaggtggaaagcccggtgggctttccactgacggagccatccttatccctctgatgagggtgaccgccaaactagtctttaaatatcctgtaaggaacaaaccatgctgaacatcatggaggtccacgagaccaatcagatgatcgagcaggagaagctcgacgtccgcaccatcaccatgggcatctcgttgctcgactgcgcctcggacgatgtcgacaagacctgcgacaacatctaccgcaagatcaccacctatgccaaggacctcgtttccaccggcaaggccatcgaacgcgactacggcatcccgatcgtcaacaagcgcatcaccgtcaccccgatctcactggtcggtgccagctcctgcaagacgagcgaggatttcgtcaagatcgcccacgcgcttgacaaggcggccaaggaagtcggcgtcgacctgatcggcggctactccgcactcgtttccaagtccatgaccccggccgaggagctgctcatccgctccctgccgcaggctctctccgagaccgacatcgtctgctcgtccgtgaacgtcggctccaccaagaccggcatcgacatgaacgcggtcgaactgctcggccatatcatcaaggacgttgccgagcgtaccgccgacaacgactcctacggctgcgtcaagttcgtggccttctgcaacgtgcctgacgacaacccgtttatggccggaggcttccacggcgtcaccgagggcgacgcggtcatcaacgtcggtgtctccggccccggcgtggtctcccgcgcactcgatgcggccaagggcaaggacttcgagttcctgtgcgagaccatcaagcgcaccgcgttcaagatcacgcgcgtcggccagcttgtggcccaggaagcatcccgccgcctcggcattccgttcggcatcatcgacctgtcgctcgccccgaccccggctgtgggcgactccgtgggcgaagtgctagagaagatcggcctcgaacaggtcggcgctcccggcaccacggcggcgctcgccatgctcaacgaccaggtcaagaagggcggcatcatggcgtcctcctacgtgggcggcctgtccggcgcgttcatcccggtctccgaagacaagaacatgatcgacgcggcttcttccgattgcctgaccatcgagaagctcgaagccatgacctgcgtgtgctcggtgggcctcgacatgatcgccattccgggcgatacctctgcttccaccatctccggcctgatcgccgacgaggccgccatcggcatggtcaaccagaagactaccgccgtgcgcgtgatcccggttgccggcaagggcgtgggcgagatggcgaacttcggcggcctgatgggctacgcgcccatcatgccggtcaaccagaccagctgcgaggcctttgtgacccgtggcggtcgtattcccgctccgattcacagcttcaagaactgattcagtagggtatctgccttcaaagaggtacatttgcgcagataggtatctgctttcagaggggtacctcaatcaagaaaccccgagtacaagcgttgatatttcaacgcctatactcggggtttcgtcctttaacagcccctcgaagcggcaatagacctccggcagatgccaaatcagcccctcgaagcgccgatagacccattttctgcgatgatggtcgtgctgcgaggctcagggtttcctctctcacgcctgtcggcgttcgttcggcgtcgctactcgaaggcccaccgggccttctcctcagcgccctccagcgaagttgagttggcgccaggcttcgtagatggcgatggacgcgcaattggtgaggttcagggaacgcaaggacgggcgcatgggcagtcgcacttgttcggccacatgagggccctccatgatgtccatcgggtcggggatgtcgccgggctcggggccgaacagcaggatgtcggtcggcttgtattccacctcggtgtacagcttggtagcatgtgcggtgaacgcgatgatgcgcgaattgggcatggactccaccaggttgtcgaaattcgggtgcagcaccacgtgggccatgtcgtggtagtcgaggcctgctcggcgcagcttggtgtcgcgcaggttgaaacccaacggctccaccaaatgcaggatggtgccggtcaccgcgcacaggcggatggccgagccggtgttgccgggaatgcgcggtgagtagtagcacagatgcggtgttacggtttcggtggtggcggccttttcagccgagagcatcgcgtccaccacggagatggggttgccatgcgcgtcggttacgagttcgtccggtccgtaattcgatttacggtacccgtactcgaacatcttctcgacttttgtttcgggattctgtgcgttctgcgaattctgttctgcttcgttcgtcatagctgctaagaataagaacgatgaacgacacagcaatttctttgcgattgggcgcatggtgggaggccaatgcgcgcgatttgccatggcgcttcggccgggccacgccgtggggcgtgctggtatccgaagtcatgagccagcagacgcagatgagtcgtgtggtgccgtactggaccgactggatggcacgttggcccgacgcccgcgccctcgccgaggcccccaaggccgaggtgatcaccgcatgggggcggctcggctatccacgccgcgcattgcggttacaggaatgcgcccgcgtggtggctgaagattacgccgacaaactgccgcgcacgtatgacgaactcactgcattgcccggcatcggcgattacaccgcctccgcggtgatgagctttgcgttcggcgaacgaattgccgtgatcgataccaacattcgccgcgtgctgagccgcgtgttcctgggcgtcgaatcgcgcgggggagcgaccagcccggccgaacgcgcgctggcgaaccgcatgctgcccaaagacgagattctcgggtgcgatgctgacgtcgccgataatgccggtagcgccgaacatgtcgtgaacagcactatccgtggcggcaaacgctctcgactgcatcgtggcgagcgcccatcggtcacgtggaaccagtcggtgatggaactgggcgcggtgatctgcacggccaagtcgccgctgtgcgacacctgcccgattgcggacgactgtgcatttctcaaggccggccgccccggactgggggagcgccgcacccgcccacgccaacgattccaaggcacggatcgacaggtgcgcggtctggtgctcgccgcgctgcgcgagcttcccgctggagccacgttgcccagggaagatgccgacaagctttggaaggaccagattcagcttgccgcctgcatcgccagccttgacgatgacggcctgatagagattctggacggcggcctgcgactacccagctgacattgtgaaaaatggtgggctccccaagcgtgtatgggcgtggtgaccgtagactggaagagttatggcagtgcagaggaacacatcaggcgcgagaacggcacgcggagccggcaccggggccaatgggccatccggcgggccctcccaaaacaaccgttccggcaagccgcgcaagcgcaggatcagcaaaaagcagcaggccatctatcgtcgtcggcgtatcgtggccggtacggtgctgctgctgataatcgcgctgattgtattctgcgtgtatagccttggccggggtatcggtgccgtgaactcgatgatccaccatgacgaggtgtatgcgatttcccgcgacgccacgccggcgccgaagaaagtcagcaacgtcaaggattgctcggccagtgatgtgacattgcagctttccgcggcctcccaatccgtgccggtaggaggatcgcttgatttcaccgcgaccatcgtgcacgaggggtcaggcaactgtttagtggacgggtccgattccggccgtgtgctcaccattacttccggtcaggaaacgatttacaagtccgatgtgtgcccggcggattcacgtctgctgctgatggctaagggcgataaggacgttcagaaggtcacgtggaataccaatgcgaacgccacgctcgccaaatgcacggatgagtcaggttgggccaaagtcaatgcgggaacgtacgtggcgcagctgagtttgaaggatcatccgaaggtgaagagcgatccggtgacgtttacggtgcagtaaaagtcttgccttagcgctattcttttgactttgcatgaggtgtgtcatattgcgggcatgccgtcgacaatgaagcgtccgcataggcatatggtggccatgccggcgctcccaggggaattaccacatattagcgagcgataaggaacgtccattggctactgagtctacgacgaacaccaccaccatcatcgcacgcgccgaccagcatgatattgacctgcacaaggcgtcggatcgcgtgaacttcggttccatcaaggaacccatcgatgtgccctacctgctgggcgtgcagaccgacagcttcgattggctgatcggcaacgaacgctggaaggcgcgcgtcgaggaggacgaaaagaacggcactaacaccgtggcccacacctccggcctcgatgaggtcttcaacgagatctctccgatcgagaacttcgctcagaccatgagcctgaccttctccgatccgtacttcgaagagccgcgtcacaccgtgcaggaatgcaaggagaaggattacacctactccgcaccgctgtacgtgaatgccgagttcgagaacggcgacaccggcgagatcaagtcccagaccgtgttcatgggcgatttcccgctgcagaccccgcacggtaccttcatcatcggcggcaccgagcgagtcatcgtctcccagctcgtgcgttccccgggcgtctacttcgaccgccagcaggatcgcacctccgataaggaagtcttcggcgcgaagatcatcccgagccgtggtgcatggctcgagttcgagatcgataagaaagaccagccgcaggtgcgcgtggaccgcaagcgcaagcagtccgccatcgtgttcctcatggccatcggcatgaccaagtccgagatcgcccaggcattcaaggactacccgctggtgctcgacgcactggagaaggaaaccctcgagacccaggacgaggccctcgttgacctctaccgcaagattcgtccggccgacaccccgacccccgaggccggcaagaatctgctggactccttctacttcaacaccaagcgctacgatctggcccgtgttggccgctacaagatcaaccgcaagctgggtgtcgaggccgatttcaacgatcgttccctccaccaggaagacatcatcgccacaatcaagtacctggtggccctgcacgacggtgcggcgaccttcccgggcaagcgcaacggcgaagacgttgacctgcgcgtggacgtcgacgatatcgatcacttcggcaaccgtcgtatccgccaggtcggcgagctgattcagaaccagctgcgtaccggtctgagccgtatggagcgcgtggtgcgcgagcgtatgaccactcaggacgccgaggccatcaccccgcagtccctgatcaacatccgtccggtgaacgccaccatcaaggagttcttcggcacttcccagctctcccagttcatggatcagaacaacccgctgtccggtgtgacgaacaagcgtcgtctttccgcactgggccccggcggtctgtcccgcgaccgcgcctccatggaggtgcgcgacgtgcacccgtcccacttcggccgtatgtgcccgatcgagtctcctgaaggcccgaacatcggtctgatcggctccctggcaaccttcggccgcgtcaacccgttcggcttcatcgagaccccgtaccgcaaggtcgtcaacggccacgtgaccgacgaggtcgagtacatgaccgctgaccgcgatcttgaccacgtcattgcccaggccaaccaggagctcgacgagaacggcaacttcgtgcagaagtccgcccttgcccgagtcggcgaagaagaggcggtcgatgtgccggtgagctccgtggactacatggacgtctccccgcgccagatggtctccctcggcgcctccctgattccgttcctggagcatgatgagggccaccgtgcactgatgggtaccaacatgcagcgtcaggccgtgccgctgatcgaatccgagcgcccgctggtgggcaccggctccgaatggcgcgccgccaacgactccggcgacgtcatcaagtccgagaaggacggtgtggttacctacgtgtccgccgacctgatccgcgtgatgaacgacgacggcaccaccagctcctacaagctggccaagttccagcgctccaaccagaccacctgctacaaccagcgcccgatcgtccacgacggcgagcgtgtggaagccggctcggttatggctgacggccccgccatccagaacggcgacctggccctgggcaagaacctgctcatcgccttcatgccgtggaacggctacaactacgaggatgctgtgatcatctcccagcgcctcgtgcaggacgacaccctctcctccatccacatcgaggagtacgagatcgacgcccgcgaaaccaagctgggtgccgaagagatcacccgcgacctgccgaacgtcggcgaggacgccgtggccaacctcgacgagcgcggcatcatccgcattggcgccgaggtcgaggccggcgacatcctggtcggtaaggtcaccccgaagggcgagaccgagctgaccccggaggagcgcctgctgcgcgccatcttcggcgagaagtcccgcgaggtgcgtgacacctccctgcgcgtgccccacggcgagaccggtaccgtcatcggtgtcaaggagatcacccgtgaggatgccgaggaggacggcgacgagctgcccaacggcgtcaaccagatgatccgcgtctacatcgcccagcaccgtaagatcacggtgggcgacaagctctccggccgccacggcaacaagggctgcatctcccgcatcctgccggaagaggacatgccgttcctggctgacggtactccggtcgacatcatgctgaacccgctgggtgtgccttcccgaatgaaccttggccaggtgctcgaactgcacctcggctggattgctcactccggttgggacatctctttggatccgaatctggaagccgagtggaagaagctgattccgtccggtgccgagaaggccgagccgaacaccccggtcgccaccccggtgttcgacggtgtcaagcctgaggtcctgaagggcctgctgtccaccacgctgccgaaccgcgacggcgaccgtctggtcggccccgacggcaaggccaccctgttcgatggccgtaccggtgagccgtacaccaagccgatttccgttggctacatgtacatgctgaagctgcaccacctggtcgacgacaagattcatgctcgttccaccggcccgtactccatgatcacccagcagccgctcggtggtaaggcccagttcggtggccagcgcttcggcgagatggaggtgtgggcccttgaggcctacggcgccgcctacacgctgcacgagatgatgaccaccaagtccgatgacgtcgacggccgcgtgcgtgtctacggtgccatcgtcaagggcgataacctgccgccggcaggcatccccgagtcgttcaaggtgctcctgaaggaaatgcagtccctgtccctgaacgtcgaagtgctcaacgccgaaggcgtggccatcgacatgaaggatgaggatgacgatccggccagctccgctgacgacctcggcttcaacatcggcgcccgccccgacgcggccgccaaggaagaccagaaggccgaagagcccgaataccagtgatccctcgggctgcatgcggtcaatacgccgcgtgtagctccgccaacgtgaaataaataacgtacagagacctttccggtttgcactacccctcagtcagccttggctgacagctcccctgacaaggggagcttgggaaggtctcaagaacagaaacggattaacaagtgctggacgtcaacgcatttgacaagattcgcatcggccttgccaccgccgatgacatccgtggttggagccacggtgaggtcaagaagcctgaaaccatcaactaccgtacgctgaagcctgagaaggacggtctgttcggcgaacagatcttcggcccgacccgtgactgggagtgcgcctgcggcaagtacaagcgcgtgcgcttcaagggcatcgtctgcgagcgatgcggcgtcgaagtgacccgcagccgcgtgcgccgtgagcgcatgggccacatcgagctcgccgccccggtgacgcacatctggttcttcaagggtgtgccttcccgcctcggctacctgctgaacgtcaccccgaaggacctggagcgcgtgatttacttcgcctcctacatggtcaccgaggtgaacgaagacgagcgtcacaacgatctgcccggcctgcaggacgagttcgattccgagatcaagcgccttgagcagcgccgtgactccgacattgaagcccgcgccaagaaggtcgaagaggatctcgccgcccttgaggaggccggcgaggccaagggcccggcccgcaccaagttgcgtaacggtgccgagcgtgatatggctgccatccgcacccgctacaacgaccagatcgcccgtgtggacgccgtcttcgacaagttcaagaagctcaagcccggcgacatggtcgacgacgtggacctgtggcgcgagatgcaggaccgctacggcgattacttcgacggctgcatgggcgccgaagccatcaagaagcgcctgcagtccctcgacctggagaccatctccaaggaactgcgcgaggagatcaaggacgcttccgaacagcgtaagaccaaggccctgaagcgcctcaaggtcgtcaacgccttcctgaccaccggcaacaagccggaggccatggtgctcgacgtgatcccggtcatcccgccggacctgcgcccgatggtccagctcgacggtggccgcttcgccacctccgacctcaacgacctgtaccgccgtgtgatcaaccgtaacaaccgtctgaagcgactgatcgagctcggcgcccctgaaatcatgctcaacaacgagaagcgcatgctccaggaagccgtcgactccctgttcgacaacggccgtcgtggtcgcccggtcaccggtgcctccaaccgtccgctgaagtccctgtccgacatgctcaagggtaagcagggtcgtttccgtcagaacctgctcggtaagcgagtcgactactccggccgttccgtgatcgtggtcggcccgtccctgcgcatgcaccagtgcggtctgccgaagccgatggccctcgagctgttcaagccgttcgtcatcaagcgcctcgtggacctgaactatgcgcagaacatgaagtccgccaagcgtcttgtggaccgcggcgacgccgaagtgtggggcgtgctcgaggaggtcatctccgagcaccccgtgctgctcaaccgtgcacctacgctgcaccgtctgggtattcaggcattcgagccgatcctggtggaaggcaaggccatccacctgccgccgctggcctgcgccgccttcaacgccgacttcgatggtgaccagatggcagtccacctgccgctctccgccgaagcccaggccgaggcccgctcgctgatgatggcttccgacaacatcctgaagccggccgacggccacaccgtgaccatgccgagccaggatatgatcctcggtttgtactacctgtccaccgtgctggaaggcgtcaagggccagggccgcgtgttctcctcgctggaagaggccgaaatggccctcgaccgccacgagatcgacatgcaggccaaggtgctcatccgcctgcccgagagcttcgtgctgccgaagaactgggagcccggcgaagtcaaggtgctcgacccgcgcgaaggcgaggacgaggtcgtcaaggaagaacgcttccacgacggcaccgtgctgttcgccacctcctacggccgcatcctgttcaacgagaccctgccgaccgactacccgttcgtcaacgagcaggtggctaagggccgtctgtccaagatcgtcgatgacatcgccatgcgttactccacccagcaggtggccgccacgctggatgccctgaaggatctcggcttcacccgcgcaccgtggtccggcgtgtccttcgcgttctccgacgtgaacgagccgcccgagcgcgacgagaagatcgccgagtacgaggccaaggccgacaaggtcaacgccaactacgagatgggtctgttgaccgaggaagctcgccgtcaggaactcatcgacctgtggaccgagtgcaccgccgaagtgtccaaggaagtcgaggagaagttcgacccgacctccaacctggccatcatcgtgcagtctggtgcacgaggcaacatgatgcagatcaaccagattgcaggtatgcgaggcctcgtggctaacccgaagggtgagatcattcctcgtcctgtgaagtccaactaccgcgacggcctgtccgtgctggagtacttcatctcccagcacggtgcacgtaagggtctggccgataccgcactgcgtaccgcagaatccggttacctgacccgtcgtctggtcgacgtctcccaggacgtcatcgtgcgcgaagaggactgcggcaccaaggccggtctgcccatccgcgtcgccgagcgcgacaacgacggcaatctggtgctcgtcaaggccgccgacggtggcccgtactcccgtctgctcgccgccgacgtcatcgacccggccgacggacagaccgtgctgtacaagcgcgacgacgccctgtccatggacgtgctcaacgacctcgtggcccacggcgtcgaggaagtcaagtgccgttccgtgctgacctgcgagtccaagcgcggcgtgtgcgccaagtgctacggctggtccttggccaccaacaagctggtcgatgtcggcgagaccgtcggtatcgtcgccgcccagtccatcggtgagcctggtacccagctgacgctgcgttccttccactccggtggtgtggccgcggcctccgatatcacccagggtcttccccgtgtcaccgagcttttcgaggcccgcaccccgaagggtgaggccccgatcaccgagttcgctggcagcatcaagatcgtggagaacgatcgcggtcgccagatcatcctgaccccggacgccgattccggcgcaccgaaggaagacggcgtgatcaagccgatcacctaccaggtctccaagcgcgtgccgctcaaggttgccgacggcgaccacatcaaggtcggcacccagctggtcgaaggttctgtggaccccaagaagatcctcaccatcctcggcaagcgcgccgcccaggtcaacatcgtggaggaagtgcacaccgtgtaccgctcccagggtgtggatatccacgacaagcacatcgaggtcatcgtgcaccagatgacccgtcgcgtgaccatcatcgactccggcgacaccgacctgctgccgggtgagctggtggacaacgcccgcttccgcgagatcaaccgcaacatcgtcaagaacggtggccgtccggccgtcggtcgtccggcgcttatgggtatcaccaaggcgtcgctggccaccgactcctggctgtccgccgcatccttccaggagaccacccgcgtgctcaccgaagccgccctctccgagaaggtcgacgacctcaagggcctcaaggagaacgtcatcatcggtaagctcatcccggccggtacgggcctcgcgcgctaccgcaacgccgtggtcgagcctgacaaggccatccgcgacaccatctacccgaacttcggtctgggcggcgatggcgatctcggcgacgcgagcttctccgacgccgacctgtctgacctgaacttctcgaacctcgagttcggcgatctgaagctcggcgacgacttcaacccggatgatttctactccgatcagggcggtcagcctgacatcgaggagtaagtgagaaggtcctagaaaggatgccccttctaggactcagatcttgcgttaatcgcaataagatggcccggaactatatcagttccgggccatccgtatatttgccattgtgattttcctgttgaacaagagcaggcagccgctcgttgcttgattactcaagcctgtttttcggtgaactggaagaactggtctccgatacgcaccgtggcaggcgcgctgagcttgagcggtgtgcccttggtgacttgtgtctcttggccattggtgatgatgtaggtgccgttcaacgagccgtagtcctcgatccacagcgcgccatcggtgtcgatgctgatggcggcatggttgcgggatgtggtgcgggtcgggtctacgatacgcaccgccttggcaccctgcggcacatccatggaaggcttgcggcccagcaacgtgctcttatcgatcacgatggtctggccggtgacatcgttatgcagcaggtacgtcttcttcggtgccttggacgtgaacgaggaggagagcacggtgctgtcccaatcctcgatgtcgttttcggcggcgtgcggtgtggtgtctgccggagcggtggcagcgggctcagcggcggcggccgtggcggcaggctctgcggtaaaagcggtattggttgccgcttccgcggtactgggctgcccgtagtcgttctgcggttcggctgtgccaactgcggaatccggggtgccttccaccggatcgtcagaatacaaacccagttcaggtgctggagggtagggaagtttggccatgatgatgccgtcctttcactgacgggaagccagagcggcgttgattgccgggtcgccgagctggcccagccattcgatcagtgccggataggtgttgggattacgtgcgatgcaggcgcgtagttcaggcgcgcactgggcaatctgggcgatttgcatctggtcggtggtggtcagggcctgttcggcggtgaaaccgtaaggattggtggccacaggctcctcgaatgccgcctgagccgcgggctgctgagcctgttcggcggcgggctgctgggccgcctgtgccgtggctttctgatcctgaaccgggccgccgaatgcctcggcagtgaacccgtattgcgccagggtctcgcgggcgcgatcgtcaccgaactcggcgatccaacgcttcaagccgggataacagcgcggattcacggcgacattggcaccgaattccggattctcgtaggcgatttttgccagcagaatcggatccgcgttcggatcctgaacggcagcgaccgcagcatcataatcaaccatgggattacctccttatgttcgctcggttatgccgaacgtatggtccgtagtgtttgtagtgttgcgtcttcaatggcgccgatatcctcaccttcgtccagcctgaatgcgctgaacgcatgatgttcgggttcggtcaatggcatatcggccacaatcacagtgatattgtcggttccgcccgcatcaagagcggccgccaccaaggcgtccacggcctcctgcggactggaatgcgccgcggcgatggccgcgatctgttcgtccggcacctcgccatgcaatccatccgaacagatgatgaagcggccggtcagatcggcgacatatacgtcgggcatgatgccatccggatcacccagacattgggtgatgatgttgcgtggaatggtcgcctccgcctcttccggcaacatctgcccggaatcgatggcttcttggcgctgggaatggtctcgcgtgatgcgggtcagcgaagcggcgtcccacacgggaatgatatccgtggcgggagcatcggcatgcgccaacggactgagatggtaggtgcgggaatcgccgacattgaccacataggtctggtccgagaagtcctgatcatcggcgtcactgaacaaagcagcgctgcgggcgctggcggaatccgcatgatcttggggcagtaccaaaccggagcaggttgtgccggccacgccgccaaggcggtctcccagatcgagaatgtcgtgctgggcccgtgccaaggtgtcgtcgatatcctgacgggtgcgtgaaggcatggcggccaattgtgcgaaatgctgggcagccaactggcttgcctgctcgccgcctttgccgccgcccatgccgtcacagaccatgaacacgccttgttgcgcgaatccggtgtcttggttgtttttgcgcctaagacccacgtcactggtcatcgcgatacggatggagcctgtggtcatgacgccttccccttcttacgcgtgcgcttgacatgcgtcgtgtgcggctttgctgcgtgcccatttgacagtatagccacgcttttcagggaaagtcgtgtacgtatcctcctgaaacgcggcaaagaagcgagcattgccttgcgtaattggtcgactcctgtccaatatgtggtggcttggcccgattcaatgtcttgccccgagaacgtggcgtagtcggcttcccggccaagctggatcaaagcctggtcatctgtgccgagttgacgggcgatggcaccggcctgatctcgacgagtgcccttggctgtgatgccgctttgctcggcaagcatgcgtatggcattccaacctgctgccacacgggttttcggactgccgtgtcgccgcgctcgtgccagcagtatggccttgaacatcagaatcagaccgcaggcgatgagtagggtccacaatgggctgccgtacagggccaccttgcgggtcactcgccagaaccgcgcccagaacaggttggtcggcgaatcatcggcgtcggcgccggccaatgagctttggcccttggcttgcgtctgatcgcgcagcggatcggtcaacggcactggtggttgccggaccagcgtctgcggattcggcggcgtcaggttctggttttcatcaggcatcttggtctccttgggcgtcggatagaacgccacccatcccaggccctgcaatttgatttccacccaagcggtgacatcgttgccggtgaattcgattttggtgccattgcccgaggtcttctccgtgcgggcatcggtgatttcgccatcctcgtttttcggcaggaagcccaggaccacacgggagggcagtcccagatcacgagccatcagtgccatggcggaggcatattgctcggagtcgcccaccatggccgtgcctgccagcagcttgttgatgcggtagttgccatggccggcatcggagggatagtcgccttcaagtccatgagagaaccatccggagtctttcaatgtgtcggccaacgccgtggctgcggtaccgcccgaggactgcccgccggcaatggacgtggccagtttgctggccgaatcgggaacatcctgggcttctggttgggtgatgcgggccgcagccgcactgctgatctgcttatcggtgggattacgggcgataatgccggattcggtataggtgaggcctttacgcgtgccggcgggaataatggcggaatcggtatccgtgttgtagtaaaacgtgtcattgccgttgtcggcatcgttggcgaagctcacgccagtggccgctcccgccagcggcagccaggtgtcggtcagtccctgatcgacggtgaaggtcgcagtgaaggatttaccctgctcatccgccttgatcgtggtgcccacgcgatgataattcgaggagtccgtggcttcggaagaatcggacaggttccatactgtgccatcgaatcgatccatcaccgcaagtttgaccggtgttccggccggcagattatgaacggtcagcaacacgtcttttttgtggtccttgatataggatcgcatgccgctgagcgggctggtgtaatcgtaggggcttaacggcggatcgtagcggtcacgcagcacgaaacggtcctgtggcaccagcaacgtgcccccgaaagcaaggccggcagcgagcacgacgatgatcagcgcggatatccagcgcccccattccagcagttcaagacgccaagacagccagataatcagcagcaaggcaaaggcaataccgcagatggcgcgttgccagccgctgtctgtgcccagcagggcacatacggccacggccgccgcaaggggcagcactcccaccagagacaaccatgcgttggcattaatggcaaacacgccggtgaagaacgtaagccacaggccgatggtccataccgccatcagcacgccgtcttgcgtgcccagaggcggatcgacggaaataatgtacttgaacgagccaaacgtcatttcccaacctgaactcaaggtcttcaaggtgggaatcacgtaatgggacgtagtggaactcagcgttaccaccgggccgatgatgaattgggcaaacgccagaaacacgatttgccaccacagtcgcaacgccggcaacatgcccgccagagcgatgatcgcgcccagcaaggtggccggtacagcggcaatcgcccaagtggccacgccgccgtacacgtcgatgagattggcttgcgccagcaacatcatcgccgctatgagtacgaggctggcgattcgtttgccccacggctggcgactgaggcccatgccgcgaagcacattgcctctggtcatccagataaccgaatgtgtggagtcggcccaggagccggtggtggtggaggtcccggtgtacgtgccggaggaagtgccggtgtatgtgccgctcgatccggcgtacgcagcggtattggtattggtgatactggactggtcgaaggtcatgcgagcacccccatgatcagcgggagatcatcgaggtcgccgatggtggccaatgtgaagttggcgaatcttctgatgccgcgattggcgccggcgctggcctgcaataccacgcagctggccgatcggggcaaggccaaggtcatgcgcttgatttgctcgatgtctttcagcgatccaacagtgaaaaaatagaacgaagcatcaggactgtgcttcagcgtgccctcggcgagattcggattatcctcacgatcaggctctatggcactggcgttgtcgaggaactccatggcgttgcgcggctggccgtgcgtgttgcccgcgtggcagaacaatggacgatcctgcagcaggcatttgacgccgatggaggagtggatggacaccgccatctcgaattcctcgccgttgacgtattcgtccgggttcacgctgatggtcaccgaggtgtcggtgcggcgcgtggcctcatattggcgaatcatcaacgtgccggttttcgcggagctcagccagtggacgttacgcacgtcgtcgcccggctcgtattcgcgcaatccgtagaagtcgagatcatcatccacgatctggccggatggttggccttccaggtcgcggggcacgccggcattcagagtatcgagacgcacggtacgagggtggatgaatacggtgatgcggtcggccagctccttttcgtgacgcaccagaccgaacgggtctcccttgcggatgcgcaatgggccgatgggcagtattgcgcgcgatacggtacggaactccacatcggtttgcttggattgcccgggagccagcatggggatgttgaatcgttcatgcgcatcgccgattggcagatatccgcgtgccgtggtcgtcggcgttctgccggtgttgtcgatgccgacgataacggatacggtgtctcccacggtcacgcgatgattggatacgacgatggacgcgtggaagcgtgtgttgccgagggaaagcacgattgccgcgagcatcatcaccatcgccacgatgccgaatacgagcagctcataccagcccagaaacgggaacgcaataaggcatgcgatgcctgcgcccgttaccgcccagcccaagggcgagacgtaggatgcgaagaaccgtctgatgcgtcttaccgcgcgcttgaacatgcgttcagcgcgccggcgacggcgtaatgcggcggatgtagatgccatggtcggatacctttccgggccctatcaggaaccgatggtgggggagggaacgtcttcgagcacctgtgcgatcaggctttccggagtcgcgccatcgaaggtggcttccggagtcagcgtgatacggtgtgcgagcacggccactgcaaggtccttgacgtcatccggcaccacgtaggcacggccatcggccgcggcccagatacgggcgcatcgggtcagtgccaaagcgccacgcatggaggagccgaccgtgatcttctcgttgtggcgggtcgcctcgacgagcctgacgatgtattcacgaatcgcatcatccacatagatttcggtggccacctgacgcagccgcatgacatcgtcaccgctcagcaccggggaaatggtctgcgcacggtcggtgatatcgacctgcttgaggatatcgacggacacatcatggcccgggtagccgattgacgtcttgataaggaatcggtccatctgcgcctcaggcagcttataggtaccgagctgctcgatggggttctgggttgcgatcacgataaacggctgcggcacatcatgtgtgacgccgtcaacggtgactttctgctcttccataacctccagaagtgcggactgcgtcttcggcgatgcacggttgatctcatcggccagcacgatggaggcgaaaatcgggccttcgcggaactcaaattctccgcgcttctgatcgtagaaagtcacacccaccacatccgaaggcagcagatcgggcgtgaactgaacacgcttgaaaccggtggaaatggaattggccaagcctcgggccaactgggtcttaccggtgccggggttgtcttcaagcagaatatggccaccgaccatcagtgcggtgacgcattgcttgatagggatggtcttgccgataaccaccttggagacattttcgaccagcgcattgaaggactgctggaaatcccggacctgagccgtgggctggggcagtagtccggaattgatgctggcgggcagtgccgatgcggctgcttgcgcggctttgctcgactgacgctgcggctgtgattgcggctgggattgcgcggtggcctgctgcgggatggctggcgtcgatcccttgcgcggcttgagcacggtgctgtcatcgcccgcaggaatggaggcggcatcagtagtaggagacggcttttctgacggcgcttgtgacggccgctgcggcaggttaggcagcgcaacggactgcggcgccgactcggtgcttggggtcgtgccggtgtgtggtgcggatgccaggtgcgtggcgtcggacaagtgcgtgctgtcggatagctgcgtgctgtcggacagacgggtcgtgtcagacaactgcgtcgcgtcatcgatgttctcgctcatggatgttctcctactgcttgtgaatggtggttgacgatattggggtattgccgaaaccaagaatccaggggttcttggccaaagtggtgacatcggtaccggatttgagcgacttggtcccctccgaggagtcagagggacgtgtgcccgcgacgctgcctccgtccgcagtgttgtcgagaccggagtatcccggcccgccggtgactttgacgctccacgcgtagttgccatcggcggccacggccaagtcggtgacatccaatggctggccggagttccacgtgaacggttggccattgatgatgatttgtacagtggccgacttgccatagacatcaaccgaaccgccggtgacgttaatgacgtgagcgttgtctgaccagcgcagctcctgcggtttgttgattacagccttcttctcataggtgtaaggagcgccattgtgcgggcctccggtgacggcgtcgctggtagcgccgttgaacacctgttgcaccgatgcggtgttgcatttggcccaaggactcattcggaagtcgagtgagttccggttagtagctgtaccggaatcgatgccatcggcagtcacgctgtaggactgcgcatgtccctgcttggtccaatgcacggtgcatgtactgccggatccggtggtgtagacgtcagtgggcggctggaccttgtactgcgggacaaagctgctcttgcccgtgccggaggaagcatcgcgctgcggcaccacggtggccgttacggtgatttcccgggtgttcaaatcgttctcattgatatcgaacgtagcgccactgtcactgcaatcgatggtgtccttgacgtctcctcccaaggaaattcgccggcagccggcattgcggttattgccgagagtgactttcgccgttaccgtggtgtcgtcgttcgacaacgcaatgttcggcgcatccgggtctccccagatcttctctgacggcgatgcggcggactcggcactccaattgattttgttatgggctttgacggtcgccgtaatggcggtgccatcggaaatgtcgttgttgttgaacgtaaacgacagctcggtggccgtattgccggtttccttggtctgcggagcacctgcaccggtgacggtcactgaatagttgtcgacggcgctgaaatcaccgctcggcgctttccacgtcaccttggcggttttattgccacctgtgaccgtaacatcggtgggagcggacggcaccttgtccggtgtggcttcgacggcggtggacggcttggaccagccgacgtcatttcgcgcggcgacggtgaaggaataggttttgccgttcttcagaccagtgacctggcatgaggtgacggtaccgcaatccttctctccggtgacggcaccggtccaactgaccttgtagttggtgatcgggctgccattggcggcaccgggcgtccatgtgaggctgaccgcgctgtcctgcggttccccggctacgggagagagcagtggcggctcgggcttgtcgatcacggacacggtaatcgatgcggtgacttcacgatccttggacttggtgccgtcttgcacggtgacgagcacggtgttcgtggaagcacctacatcggatgcgacggcgatggtgatgtttccggaggcatcgcatccggcgatggtgagtttggcggcgtcatccgccttgcagctgatgacggtcagcgaggaatcggggaacggattgtacgcgccggtaagcacgttcacggcatcgctggcaccggccttgatcttcaacgtcttgttgccgacgcgtgtcagcggacgggtcgaagacactacgcgcacggtcacaccggcattcacggtgcccgcgccgtatgcgatttgcacgggaatggacgcggtggtgccaggagcggcatccttggtggcggaaacctgcaagctaccggaacgggacaggtttgcggtgatttgcctggatgatgagcttccaccggaatacgtgtattgcttttcgtcgtcatacacgccggacggtgcatgggtgagcgccgtcagatcaacggtcttggggtccgcgcccgcctcgacatcaatagtggaggacgagaacgtgggcggcggcacatcgcggcctatcaccgtgatctggagagtgatcactgcggaattgatgatcttggtcttatccgatccctgcttgccatccacagcggtaaaggtaatggaggcggggcctgcgtagtcttttgccgcagtgaacttcagggtcttgtcgttcacgtagaaatcggagttggaagccttggtggcgctgacggaatcagcgctttcgatatacggttccttgccggcgccgacgcggacatagtcattgatgttgatttcaatggtctcgcgcgagttgaccttcaattccggtgccttgggacgcagcgtgggcggaaagacaccataggccggtacctggatgaacgcggtggaggtgatgttgtatttcgtattggtcaccgtgtaaggcacggctcgcgcctgtgacgtcaggtcgacggtgatggtggtcgaatgctcgccgcccttgacgtgagcgtgagcgctggcggagggatgcacgccgaccttgagctcattggctgtgccggaaggattggcgatccactgggaaacatccacatccacggacttcttatcgatggtggcggcggacggcacacgatagtcgtaggcggtaggcggctcgatggcggcactcggatccacgtttaccgtgagggtggccgtatcggacaagccggccttgtctttgaccgtgtaggcgatatagtcggtggtggcgctgccgggcgtggtgaaggagatcatattgtctttcacgctcaccccgtcgagaccttggacctcgacatgcttgtcgacggtcagattggtgttgtcgccggagatgtcgttctgcgcgaccggcacggttgcggccgtattgggcctcaacgtgatttcgtcatccctggcgtatacgccggagtcggacgatccttggaatacgcccacgcggatctgcgcctgtgcgcgctgaccggtccaatcctccacggcataggagaaggtgtcggtgccggacgaatccggatacgcttcatagaccaagtagtcggaaccgacttcggatatgcggcccagcgtgggtgccttgttgcccagacccaacagctgatcgtcgtcgccatccgtgtctatgccggtcagtgtgatggggatgcggaccttctgcccggcggcaacctgcgcttcggcgtcatgcggggttggcgcggccttgctcgctgcgtcgctcttatgcacggtaatggtgatattggcggaagccacattacccagattgtcttcaaccgtataggtgatggggaagttgccggtctcgctggatgcttggtagcggaccgtgtctccagagacgaaggccagacccttgaacgtccccttgtcgtattgcaggttgttcttgagtttgaccgtggtgccatccgagtaggccacatggtcaagcacatccacggacacgatgccgtcggtacgcacctgggcattgatattgctggccttgggcactgaattcgaggtggccagagccggcggctgcaacacgatggtgcccttggcggttccggaggcgttggccacggtgtaggtaagggcgacgggcttcgtgggcacctgacgcgcggtgatatacacgcgcttatggctgacgagaccaaccttgatgccggagtcggccggtgcgctcaccgtggtgacggacagcacaccgcccatcggatcgacgtcattggtgagcggctccacaatggcggtattatccgcgccaagcagggcgacatcgttggcggcaaccggtttggcggcctcgccggtggcaggctgcacctcgactcgagccaatccggtggccggaatcgaaccttgagtaatgatgtagggcacataataggtgccgggattggtggccttgaacgtcaacgacatatccgccgcattggtggtcgtcgaagcgccgttgggcgtatccacctgagtcagttgtgccggctgcaaggaagtgccatgcacataagaggacagcttgacgacggtatccgtgttgggaacggtggttttcgctaccgggtcgatgaccgcggccaaggtgttcgcgggcttgaccgagaaatacaccatgccggtgccggttgccgtgccgtcggagacggtgacctcgacgcccacacgtcccgacgccagcgcaccggtgttgaacgtaagctggccgtcggctcgggtggacacctgcacctggtcggtgttctgggccacagcggagaccagagtgagcgggtctccatccggatcgttgaagctgctcagcgcattggcggtataactggctccctgctccacatcgatctcgggaggagtgtcgaactgtacgggagcgtggttgcctccatcattcagggttacggtcaccgtggcggaagaggtctggccgcgaccatcggaaatatcgtaagtaaaggtaacggtgcctgcggatgcggcggaggcatcgagttgcagataccggccgtcgtaaatcggcgaaatggtgacgtctttgttgtttggtgcgccaaccttggtgattttcagtacggaacaatcggtctgctcgtcattgcgcagcgcgtcgagaatctgttccgaaccggctcgtgcgccgatttcatcatcctcggctttgatttggccggattgtgcggaacaggtcttggagaagtcgtggtggttgttggccgagtcgttgttctgctgttctttctcggtctgctcggtctgtattttgttccactgtattttgatgactttggtggaatcctcagggttccacacattgccgttaaccgtgtcgttgagcaccacaaggcgatggttggtgcggaacaccaattcggaagtagtattgacggattcgagggtttgcggcttgacgctggtatccgtgggggagcaggcgcgaatgtagttgctggccttctggctccaagccgagtacacgcagcccttggacgataccggtcgtgctggattcgccttgcccccgttggctatgaaattcgccttggcattggacttcaacgggataagcgcaaggcctctcggtgatgccgcggccacccaatcggactgtatgtcatcggtgggaggctcctgaagggtgagggtgccggtcgtgtcgacatcgacgcggccgcccttgaatatgacggttttgccggttgcgattaccggcgtgctcccgatgacggtaaagctttcaacggtctgctgcttgccgtcggtcagcgattcgagggttttggccttggcgctgctgggattgtcaagacgcagcaccataccgtcggatggacggtatccgtagaccttgccatcgtgggttactgcgatgcgcccgccctcgcccagctttattttcggatcggaagtggtgggggtcacggaatcaaggttttccgacaagccggtccacacattgccggtcttctcgttgatcagggctgcggtatccccgccgaccacagtggtggtgttggctttgatgtcggtcttgacaccggtgctgaccgtggatgccttgatggtggaggctttggtcgtttcggtcaggatggtgtcgccattatgctgtgcgatgtcgaatcgtggggcggaggaggagacgccggcgtcggcctccttgttctttacgttgaatcgtgcggccttctggtttttcagcgaagtgacccatacggtgccatcgtccagttgcacatggcggcgcgtgacggtgctcatgatcaccgcgccggcaacaagtcccagaagcagcaggagcgtgattacgggaaccgtccacgtatgccctccggagggcataaggcggcgcaaagccgcgctgatgcgtcggcgacgatcgtatgactgggacgatgtggccatctgaactccctgacccctgttttctctggttgctggtgtaatgacaacgctttacggttccaatacctgccgttcctgttgtccatttggtgaattcgccgctgctgggcgcacgtctgatgcgatacgcaatgccagggtggcatgcccggcagtggcgagcggatcattcttgcggcttggccgcacaggcgatggcggggctgacggacatctggcggttcttgcgcacaatggacacctgaatgcaggtctgcgagccttcctgcgcgttgacggtcaccgtgggatctgacgttgtgacggtttgcgcgctctggtcggtattgctgccctgcactatggcccacgcataggtatcaccgctttgcgggtctggattcgtccaggcgaacgtcacggatgacccatccgccgcataggtgccgttcagattctccggggaaggaatctgggcgttcgcggtatcggtgatcacgtcatcctgattattgcggttgttgtcatcatccttggtgccgggcgtcgccacctgtttggtatctgatccggtggcgctgtccatgcggggaacgaccacgaaggcgaatatcagtgccgctgcggtgatcgccgcaagtataccgacggtaatacccaccggtttgacccatcgccgtgacgaacgggtgatctgatctcgctggtccgtggcccggcgccgacgctcgatgtctttgggataggccggcatcccttccacggtaacgggagtggcatgcccgaaatatgcgaattgcacacgctgcatggcacgtgcgaactccaacgcggagtagtaccgctggtcggggtccttgttcagggcccggcgcagcaccgcttccacatcggccggcacgtcggggcggttgaggcgaggcaatggctggttgacgatcagcgaaatcagttccgattgcgaacgcgggtgataatcgtgctggaatggcgagcagccgacgaacatggcgtacagggtggccgccagtgaatagatgtcggcggcttccgaaccattggtcagatgctgaagcacctcaggcggtgcccacggcggcgagaatccggtttcggtgcggtcatacacatcggtggagataccgaaatcacccagaacaggcaagccctgcgaggtgatgagaatgttgctgggcttgatgtcgtgatggatgatattgctgcgatgcgcggtgaacagcgcgcttgacagcttgatgccgaggtcgagtacctgctcgcaggtcatggaccgggccttcatgatgctgttgtaggtgccgcccggcgcatattcgatgacgatgtagccatggccatcggaggtgacgccggcaccatataccggcagaatgtacgggtgggatgacagcttggccatgaagttggcctcgcggttgaacagggcagcggcccgtgggtcaagggttttggcgctggcctttaccgccaccgggcgtgcgggcatacgctggttatataggtacaccgtggcggtggcaccgcttcccaacatctggacgaaatcatatccgggcagcttcggcggtctcatcggaatgttgtccatctgttccctccctccttggaaaatgcgctctccctgcattcgttctacaggataccgtcaagggtacgattcttcgtcgggttcggtaaaatttttccctctgtgacggccgggtttaggctggagccatgatgacgagacttgaacctggaacagtgctggacggcatcgaccgtgatggagcggcgaggctgattgtcggcacgcctggaagcggcaaaactgaattcgccttatcggtgttgatggcggggctgcgccgctatggtggcacgcaggcggtgatggccgtatccggccgtgtggccgccgacgcattgggcaatcgggtgattcgtgagctcgggttttccgtgcaggccaggccggtcaccacgctgggtgccgtggcattccgggccatatcggcttcgcgcgagggaactggattgccgtcgcctcgattgctgaacggtgcggaacaggatgctttgctgcgtcaagtcatggccgtgcatctgcgccatgccgtagcgggagatgattgcggcacctgtgatttgctgcgcgtctactttgcccaggatgactgggcgagactcatacgcgatgccggtgccggcgagatgcccggctcggccgcttccgcacaatcaagcctctcgcaacaagggtcggattcgccgtctccgacgtcggcaggcggctcgaccagcgcggataggttcacgcgaggtatttcagatgcgtttatcagccagttgcgcgatatgctggcccgattggatgagctcggtgtaggcgttcacgaagagccacgtctcttggacgccgtgacggaggacgcgcgattgtcggtgcaatggcgtttggctttcgcgttgcgccgtgaatatattgcagcccaaagcgcggtatatccggggcaataccgtttggatgcctcgtatttgctggtggcaggcgctcgtgtggtgcgtgaggcattcgccgccgatcacgcggatgattccgaccggcctatgtgtgtggaggcgttgggcttgccccggctgctggttgtggatgatgttcaagacaccacgctggccggcatgcgcttcttggaggagttggggaatgccggcgtcaagttggtgctggtcggcaacccggatgaatcggtgcagaccttccgcggatcgtatccggaatatctgatgcgccgtgccgtggaagggcggctgaaggccaaggaagaacagctggttggcggcagtgccgtcgctgatcagtcgcacatgacgatggctgatgtgatcgcgtctcgtatttcgctgtcgattccctcgccggaagacgagccgctgcctccggccgagcgtcccggcaagctgaccgccatactgggcggagtcgatgcagcgaattatcaggcggacggcacggtgaccgccggcctgtaccgatcctcacgtgaggagctggatgatgtggtctggcgcatcaagcgggcgcatcttgaccggcatattcggtggaacgacatggcggtcatcacccacgacaatgccgccgtgcggctgttcggcgaacgactgcgccgagatggtgtaccggtgcggtattcgtcggtcacccgtcctttgaaggacgagactttcgtgcagggattgttcgcgcttgtggagcttgcccgattgcgtgccgaggggatggcggaatgccagatgacgttggcttcctgcgcggcatatataaggactagagtggccacgttgatgaacggcccgttggtgagtgccggggccaaacccggtcaggggcgtcccgcaaggcttgcgccgatcgaatcggccatggggtcgttggagtcgctggcgcatctcgccacggatgatgccatgctgacctctctgacgacggcatgggaaacattgcgtgaaacataccatgaaacacggtgtgaaacaggtcgtgaaacatcctcgtcagtggtttcgacgtcagcggtttcgtcgtcagtgacttcgttgccagtgtctgtcgaaatactcggtgaaccgtccggcgatgacttggcctttggcgttgacgcgctgtacgtgatgcttgccattgatgatgccgccgcgccggcgcaggctgcgctcgcatccatccacgcggtgctcggcaacgaccctcaggcccgcgcttttgcgaacctgtggcatctggtgggcagcgttgcttccggcttggagcggctgccggcaagccagcgcgtacagccgcgctatgcgctgtctgttgcgtggaacgccaccggtctggcaccggtctggcagcgtgcggcattattcaacacggcagaggggcgtacggccaatgaccggctggacgcggcaatgcgcctgttccagttcgccgatgattccaccgccagtcgagacatcacgtcattcatggcacaggttcggggcatggaagtgcaggccgattccttggcccacataggaccggtggaagacgcggtgacattgactacgccggcaggcgcggccggacgccactgggaatatgcgtggataccggtggtccagcaagacgtgtggccgaacctcgccgggcgcaacaccatgttcggtggtgaagaccttgccgagctcgtgctgaggggagcgcttgaagaaagcgacaaaaccgggcatgatccgcggttcgcggctgtattgtcgggcgagaagaagagtttcctggtcgcgctgacccgtgcacggcgaatcatgatcagcgcggtatggaacgacagcatgagcccctcggactttctcttcgggtatctgccggaatactatccgcgcaaccggcaacaggcgcctttcaccacagtgggggcacatgcgggattcgccgaatatgatctggccggattggacgccgacccacgtgggttggtcagcgccgcccgcgcggttctggccactgctcaaccgcagcaggctgccgcaaaggacgccgcgattgcgttgacactcctgttagagcatggtgtgcgcgccgcaaatccgcagagctgggcgtttgtggaatcgccggcccaatcggatagcgcgtcatctggcggtgcgtcatctggcggtgcgtcatctggcgatacctcatctgacagtgcctcatccgacagcgcgtcatctggtggtgtacagcctgacggtatccaaacagggaaaggcaagacggatgcgcaggccgcgcccatggtcaccttatctccatcggcggtcgacagcctatgggcgtgcccggtgtgctggatgctggagaaccggttcgccggtcctcgccccagctccgtggccaccagtttcggaaccctcatccatgcggttgcgcagcaaggcagcgaggaagggctggaccatctttcccacaatgcccaggcgttggccgcactgggcttggactccacggccggcacggaacgtcgcatcgaggctgtctcggcacggcttaatgccatctatcagagcaaacgtcctgatccgaatgccatagccgacacccggaaccgctatgaggccacccgtaaggacgagtccgcggcggataccctgcgcaacatcgccgattactttgtgcgcagcgacgccgatccggaaacgtatcttggcaagaactccagcaacttcagcattggcgcattggccggtgccgaatgcgaacgggagtttgccgcacgattcgatgtgcgtgacatactcgacgcatacaatgccgtgcccggcctgcacccaatcggtcggaacacgctggtccgtctgatgggagcactggtcggagggtggccggaaggcatggacgagcatctgaccgtgagactgtccgggcgcatcgaccgtatggaaacccgcgtactcgcagacggcggcgaatgcattcgcctcattgactacaaaacaggcagaacgcccacggtcaaacagattttcaatgatttgcagctcgtgtgctatcagcttggcctcgtgttccccgaagacgggccgcgcggtgccaaggcacttgccgcaatgccgcatatcagccaaagcgtgctattccatgtcgggcagaatgcggcaccagccagaagctacgctccggaaggtgccttccagccgccgctgttcactgatggctcgttgaatgccgaaccgttcacgccccgatactggtataaagaccccaaccgtttcttcgacatacccgccatagatccggctactcctcccgaaggtgtgagtgccgaagcgtgggcgcaattcgccgcgctcgccggtacgcagacgttatggtcgctgaccatgatcgcccgcgtattctatgccgcggcggccagcagatcagccatcatcgaggcccatccgcaagacacccatatcggattctgccgtatgaagaacgtctgccctgcctgtgcaggccagatcgacacgattttcgaaacgaggcaagcatgagcacgttcactcccagtgcggaacaggccgccatcatcgatgcgccagtcgatgctgacgtattggtggttgccggtgccggttccggcaaaacctttacgatgacccaacgcatcatcgcgcttatcaatcgaggtgtggcacctgaacgcatcctgggcctgaccttcacacgcaaggccgcaggcgaactgctggaacgcgtctccgccgcagtggccggtgatatggcgggctctacgaccgccacggtgtctgatcgggcattcctcaagccggccattttcacgtatgacgccttcttccagaccatcgtgcgccaatatggactgcttgtcggattcgatcagaacacgcaaccattgagcgcagccggagcgcttcaactggccaccgaagtcatcgacagtcacatggatctggcgttcagtgaggattttggcgccttctccagtttggcgaaccgtgttctggcgttgtcggatgccattggcagtgccatgatcggtgccggctgcaccagcttcgatgatgcgatcaatcgagtacggcaatgggattcggcattcatcaatcgattgcaacaagccgttgcagacgaacccatgcccgaggacgagccgaaaatccccaagatcaaacgactgaagaaagataccgacgccagctggcaagccaagctcgatgaccgtgccgaacatttgcacgcccgctgcacctatcattgcggtgcgctgctggagaccacacgcaaacgcgatattctgctccagctggtggaggcctatgcccaagccaagcgggaacgcaatatggccgaattctccgacttcaccattgccgcgtatcagcttatcgagcgcttcccctccatcggagagcgtacgcgccgcaggtacagccacgtgctgctcgacgaatatcaggacacctccaccacgcaggccgctctgctggcagcactgttccacgtggatgcgtcacagaggtccgccgtcaacgcggtgggtgatccgttccagtcgatttacgcatggcgtggtgccagccctggtgcattccgtatgttccagcaagatttccacctgtctgccggatacaagccattcccgctgtccgtcaccaggcgaaacagccgtatagtgctcgaagccgccaataatctcacgctgccgttgcgctccaatccgtcgcgtccttccagctcattgatgcgtgaggtcgatgtctcatcgctcgaccccatgcctgatgcccccgaaggaacattgggagtactgggcttcgccacggccgggcaggagatcgacgccgtagtgcgtttctgcaagacggccatcgcacggcaccgttccgcagccgaacaacaggaacagatgccgggcgaacagaaagcgccggtcgccgtgctgtttcggtccaaatcacatatgcccgaatatcaggcggcattggaacaggccggattgaccacattcgtggtcggctattccgcgctgttggaacgtccggaaatccgcgatctgatggcgttgctgcacgtggccgccgaccacaccgatacgggatcgctgatgcgcttgctggccacgccacgattcaccatgtccgcagcggatttgaccatgttggcccgttttgctgaagaacagaacacggaacaacgcttccaagcattggtgcaggccggccttgcccaaccggatacaccagcgaatgaatgggcggctgtggtgcgtgagtaccgcgatcaggtggccaatgcggtattcctgccagacgtattgctacgcggcgacctggtaaaactgcttgaacggttgagcgcacacgggcgcaacgccataacccgggccgcggtgatgctccgtcaggtgcatgatgccgtcgggcggccactgggcgacgtgattcgcgccggcatagaagcgttggatcttgacatcgacaccgtattggccggtgtgctgcataatccgcagcaccgcgccaatcccgctttggcgcatatgcctatggatgcgattgtggatttggtggatacgtacacgcaagagattgccgctgagcaaactccctcgttgcatgggttcatcacatgggtggatcatctggcttcggtggaggatgaagccgccagtctccctgacgctccggtggatgtggaactgatgaccgtacaccagtccaaagggttggaatgggatgccgttgcggtagtggggcttaccgccgtcggattccccagcaatcagggcgaccatctcaagatcgtgctggacgagcaccatacgggaggcaccgagcaaggtcactggaccgcacccgaatatcatgagaccgccgactcctggctcaccaaccccaccgccgtacccgtgcctatgcgtgccgatgccggcattctgccgcgattcccccatgatgccgatgtggaagccgaccccatcgcatcgttggcggctttggatgatgtggagcttattgatgatgaagtgttcggctccatgcgcgaattcggcgatggcgtggaagaagtggatgcatccggctggtatttgacgcaggcggaggaatatgggcgccggctgcatgccgacgaacgtcgattgatgtatgtggcgcttacccgtgcgcgagaagatgccctgatgacctattgcgcctatacgggcgaatccgggcgggacccgtcagtggtgcccaaaggctctcgcgccgctcagccatccaatttctggcttgaagtgcatgacgcgctccaagcccgtgaacatgcgatatcggctcaggactgtgtggaacggctgcaagccgccaatgccgggaagcccatgctgatctcggcgcaaggcgaagcgattgccactcccgaagggttctttatcggagagcatgccgcggcatacggtgacgccgtggtgggggaggcatggcagacgccgattacgcagacggatgccgctgtcgaattgccgtggccggctaccctcagcgacgcagtgcatgaacagctgtcacgtggcatcgatgttatcgccgcagattcctcgtcacttgagcagcaccaagacgccggtccactgctgcaacgggcgcaattgctggtggacgacgccgatttgatggccgatgccgccagcggccagtcgcttgatgaggcagtcaaagccaaggcgcaacgcattctggccgtcggacgtcagaacgtgacaagcctgcaagcccgcgtaggtggcatgagcgaacgggaggagcgcctctactggcgtagcattatccgtccgattccacgaatatcgtctccggcggccgaagccggcacgcagttccatgcgtgggctgagcaattcatcaatgccggtaagccggatgaagcggtactggcatatgaagccgaatcaagtatgccgcatacaggtcaggatgcgggattcgtttcccgggaagccatgttggccgatttggccgaacgggagcggcaatgccgcaagccatccacacggcagcccgctgtcccacagcccacggctcaacaatccgcatccgccgtatccgccgcctccgccacttccataagtagcgacaatgccaccgagtccaagctggtggcgtggcagcgcagactggccgaatcatcgtgggccaagcgcatcccggcgtggacggagcgtgccattgtcgtggacgtgccgggcgtgggcctagtcaatggcaaactcgatgcggtattcatcggtggacttgacccgtccagcaccaccgcacgctttaccgtggtcgactggaaaaccggtcgtcggcccaccaagccagacgacatcacccgcaaacttgcccagctcgacatgtaccgactgctgctggcagcggtcgaaggtgtggaattggacagtatcgacgccactctctactatgtcagtgagcccgacgagggcttgcgcgagcttcacgcccgtgcgaaaaccaaacaggaaatccttaccgagttgagctccggcattcccgaacaatctgacaacgactgagcccaaaggctcatgacctgtacagcatcggacggccttcaccggtggagagaccttatgcatcgcaaggcatctccgacgatgaggacgactggccacgtaccggtccgcggttgaaacgcaccgcgtgacgttgctggggaaccgctaccctcggatggcacgtgtgggcgggcgcacgtgccggacaacgcaccagtaaggagttattgtgtccacgactcgcgcggtttcgaagtcgtccgctgcccactcgccctatcagcgcctgttcatgctgcccggagccaaggcgttctgcctgtccggtgcggtggcacgattgccgatctccatgatgagtctcggcatcgttctggcgctcaaccatctctacgacaattggaccatcgccggcaccatgagcgccgcctatgtgctggccatgagctgcgtcaccccgttctacgcccgcgccttcgaccgtttcggccaagcccgcgtgggccggcttgcgctcgccgtgcagatcgtggccatgctcgccttcgccttcgcggcgttggtgcgcgtgccgattccgctgctgttcgccctggccatcatcatgggtctgacgcagttctcattcggcgcattggtccgaacccgttggtcctatgcgttgcgcggtgtggaagatggcgaacagctgctcaacacggcctacgccatggaagccgccattgacgagatcgtctttattctggggccgattctggcggcttggctggccacctccgtgcatccggtatcccaactgttcgtgcccaccgtggcatgcggcatcggcggcaccatattcttctcgctgaaatccacccagccgccggtcatcgtggaacaggtcagcgtggccgcgcacgatgacggcagccccgctgcaagcgaagatgccgaccagctgaccctgcgccaactcaaacgcagcggtgccaagcccaagagtgtattgctctatgccggcgtactgccgttgctcgccgtgttcatcgtgttcaatatgagcttcacgtccttcgacgtgtccattaccgccaccatgaaatccatgggacttgagcccttcctcggtctgcaattggcgatgttcgcggtcggctcgtgcatcggcgcgctggtgttcggctcttgccaactcaaaggctcccattgggcgcatatggtgatgttcctgtcgctgctgaccgttggctacgtgttcttccggttgtcaatggacaatctcatcctgctgggcgtcttcgaaatcctcgccggcctgaccgtctcgccgacgttcgccaccggcaacctcatcgtcaaggatctggtgccggcggaatccctgaccgaagggctgagctgggtaaccaccgcaggcacggtcggcacgtcgatcggctcgtccgtggccggcattgtgcttgacgcctccaaccctcatgtgggcatgatgctgccattcatcttcacgctggcgtccgtgccattggcgttggccggatgggccttggccaagcggcgtgggtgaaacgggatcgggctacgcccgatggatggttggcggcttcgccggggtctctccctcagtccgcttcgcgtccagctcgaacgcaattaatgatggctttcagccaactgaattattgctcactgtcgttcgccctcacctaaaaacgcctccggcgttttcttcacggttcggctcatcagagggagctcgacttcacggttcggctcgtcagagggagcttgattctgtggacggggtattggcgtgaggggcctgcggtgataggctgattgccgattggaaaacgtcccgggtacattgccgggcaggtacgggtagacagggaagaagacatgatcaaggtttcggtggtcggagcaaagggccgcatgggctcgcacgtggtcgaagcggtgaacaacgccgaggatacgcagctggcgctcgcattggatgccggcgacgacctgacccagatcaccaccgacaacaccgatgtggtcgtcgaattcaccgtgccgtccgtcagcctgaacaacgtgctgaccctgatcggccaaggcgtggacgtggtggtcggcaccaccggctggaccgacgagaaactcgcccaggtcaaatccgccatcgccaacggtccgaagcccgaaacccagaaggtcttcatcgcacctaacttcgcgatctccgccgtactggccgactactttgccaccaaggccgcgaaatacttcgaatccgccgaagtcatcgaactgcaccaccccaccaaggtggacgccccctccggcactgccatccacaccgcccacggcatcgccgaagcgcgcaaggccgcaggactcgcccccgtgccggacgccaccgaaaccgatggcggctcacgcggccaggtggtcgacggcatccacgtgcacgccgtgcgtctgcgcggcctcaacgcccacgaggaagtgctcttcggcaacgccggcgagcagctgaccattcgggccgacagcttcgaccgcaccagcttcatgcccggcgtcctgcttgccgtgcgcaagctcgccggcgacgctccggctggcctgaccatcggcctcgaccacttcctcgacctgtaatcgacccgcagtcgaccagtagttgcccccgcatttcaggcagggaagcgcgccgggacgcgcatcacggcattgccaccggctccggccataatgccacgcattcagcaacaatcaaggtacgtagtataagagtccacaatgggaagtacggtaaacactatgagcgagcatgacatgcaccttcttgattcagcacctttcggccgcattctgccggctatggtcaccccgatgaaatccgacggcagcgtcgatttcgccgccgcgcagaagctcgccaaatacctcgtcgccgatggcgcggatggtctggtggtcaatggcaccaccggcgaatcgcccgtcacccatatggatgagaaggtcgagctggtcagggccgtcaaggaggtcgtcgacgttccggtgatttccggcgccggctccaacgacaccgcacacaccgtgcgtatggtcgaacagactcaggaagcgggtgccgacgcggtgctcgtcgtcatgccttactattcccgcccctcgcaggacggtatcgtcggccactacaaggccgtcgacgaatccgccgaaaagccgatcatcgtctacgatgttcccggccgtaccggcttgaaggtcaaggtcggaacctacgaccgactggccgaacttgaacacgtcaaggctgtcaaggacgccaccggcgatcttgcagccgcagtggagaagcagcagcgcaccggcctcgcctggtattccggcgatgacggcctgttcctgccgttcctctccatcggtgccgtcggcatcatttcggtgattgcccacgtcgcctccaaccccatgcagcagcttgtccaggcattcgatcgcggcgatatcactaccgcccgtcgcctcgccaaccagctcgccccccttgtccacgcgttgaatggcgacggctatcaggccgtcatggccaaggctgcgctcaaggtcaagggcgttatcccctccaccaccatgcgtctgccgaacatcggtcccgacgccactcagcttgacaaggctgaagagggcatgcgcgctgccggactgctgtaagcccgaaacgctgcatacgggttgccagcccgccgcccctgcatgacagagcagaggcaccacaacagaaatcccaaaaaggttatggcacaagaacaaaagaaaacaagcaagaacacgaattctcgccgtcgcggttccgcgcgcggccgcaacgccaacggatccaacagccgtacgccgtcccgtaagatcaacgccacccggcaggccaccgcaccccagcaggatgccgtgctgatcgccccgccgaagtaccgcaagggctccatgcgcatcacgccgctcggcggcttgggtgaaatcggccgcaacatgaacgtgatcgaatacaacggtcacctgctgctcatcgactgcggcgtgctcttccccgaggaggagcagccgggcgtggatctcatcctgcccgatttcagctacatcaagaaccgtctcgacaaggtcgacgccctggtgctcacccacggccacgaggaccacatcggcggcgtgccctacctgctcaagctgcgcccggacatcccgctgatcggctccaagctgaccctcgccttcgtggacgccaagtgcaaggaacaccaccagaaccccaccaaggttgaggttgccggccgtgagaagctcaaggtgggtcccttcgacctcgaattcgtcaacgtcacccactccatcccggacgccctggccgtctatgtcaagaccccggccggctccctgatcgacacgggcgatatcaagctcgaccagctgccgctcgaccaccgcatcaccgacctcgtcgaattcggcaagatcggcgaaaagggcgtggacctgctgatgatggactccaccaacgccgaggtgcccggcttcgtcaagcccgagacctccatcggcccggcccttgaccaagcgttcgcccaggccacccgcaaaatcatcgtcgccagcttctcctcccacgtgcaccgtgtgcagcaggtggtggacgccgcccacaagtacggccgcaaggtcgtgttcgtcggccgttcgatggtgcgcaacatgtccatcgccgccgacctcggctacctgcacatccccgaaggcaccgtcgtggacctgaagcaggccaacgacattcaggacgacaagctcgtcttcatgtgcaccggctcccagggcgaaccgatggccgcactcggccgcatcgccgacggcaaccaccgcgatatccacatcaacgagttcgacaccgtgattctcgccagctccctgattccaggcaatgagcacggcgtctacaaggtgatcaacaagctcgtgcagctcggcgccaaggtcgtcaaccgcgacaacgccgccgtgcacgtgtccggccactgcaacgagggcgagctgctgtacatgtacaacatcgtcaagcccaagtgcgccatgccgatccacggcgaaaaccgccatctggtggccaacggcctgatcgccgtcaagaccggcgtggacccgcagaacgtggttttggccgaagacggcgatgtggtcgacctgtaccacggcagggccgcggtcgtcggctccgtgccgtgtggttacgtgtacgtcgatggcgattccgtcggcgagctgaccgatgacgagctggaaaagcgccgcattctcggcaccgagggcttcgtctccgcgttcgtggtggtcgacaccgacaatcacgaggtcgtcaccggcccgaagatctacctgaatgccgtggccgaggacgaaagcgagttcgacaaggttcgtcaccagatcgtcgaacagctcaacgaccagatgatgcagggcacgcgcgacacctacaagctgcagcagaccatgcgccgcacgctcggcagctgggttgcgcgccagctgcaccgcaagccgatgatcgtgcccgtcgtggccgacatcgcccaggacgtcgaaaccgtagaaaccaagtagtccggattatccagggacgaccgtaaggagtaattgaagtcatgcccggttctaatctcactcgtattgaagccgaagaacgtaaggccgttatcgaagcgccgattcactatcacgtcgaccttgacctgacggtcggcgcgaagaacttcggttccaagtcgttcatctgcttcaacgcgaagcctggttcgtcgaccttcctcgacctgatcgccgacgaagtgacctccatcgacctcaacggcaagtccctggacccggccgtggccttccaagacaaccgcatcgaactgaccgacctcaaggagaagaacgaggtcaccgtcgaagccaggtgccgttactccaacactggcgagggcctgcaccgctcggtcgacccgtccgatggcaacatctacctgtactcccagttcgaggtgccggacgctcgccgcgtctacgccgtgttcgaccagcctgacctgaaggccaccttcgacttcaaggtgctcgctcccgccagctggatcgtcacctccaacatgccggttgccaccatcgaggacgatccgcgcgaaaccctcgacggcaccctcggcgacaagccgaacgaaagcacccgtctgtgggacttcgagccgaccccggtgatgagctcctacctgaccgccatctgcgccggcccgtacgccgaatggcacaccgaatacctgaacgaagacggccgtaccgtgccaatggcccagtactgccgacagtcgttggccaaggccttcgcgaaggacgtcgactacctgttcgacatcaccaagaagggcttcgcgttctacgccaagacctggggcgtgccctacccgtacgccaagttcgaccagatctacgttcccgaatacaacgcgggcgcgatggagaacatcggcatggtcaccatccgcgactcctacgtgttcgaatccaaggtgaccgacgcgctggccgagcgtcgtgtggtgaccgtgctgcacgagcttgcgcacatgtggttcggcgactatgtgaccatgaagtggtggaacgacctgtggctcaacgagtccttcgctgaattcacctccacgctggccactgccgaagccaccgaatggcatgacgcttgggccactttctgctccggcgagaagagctgggcgctgcgccaggatcagctgcccaccacgcacccgatcgtcgcgccgatcaacgacctcaacgacacttacgtcaacttcgacggcatcacctacgccaagggcgcctccgtgctgaagcagctggcattctacgtgggccgcacgcagttcttcgaaggtatccacaactacctgaaccgtcacgcctactccaacgccaccctggccgacctgctgagcgaactggaaaagacctccggccgcgatctcaaggcctggagcgccaagtggctggaggaatccggcatcaacacgatcgccactggcctgaccgtaaacgcggacggcaccatcgccgaactgaagctcacccagagcgcgccggccgaacacccggtgctgcgcccgcatcgcctggccgtcggcttctacaacgaagacgccgcaaccggcaagatcgtgcgcaccgagcagttcgaactcgatgtagatggcgaaaccaccatcgtcgaggccgcagccggcaagccgcgcccggcattcgtgctggtcaacgacgatgacctgacctacaccaagattcgtttcgacgccgaatcccaggcattcgccgaagccaacctgcatcgtttcgatgatgccctggcccgcgccgtgacctggctcgccttctgggatatgacccgtgacggcgaattcccggccgaacgcttcgtggacatgaccctgcgtcttctggccacggaaaccgaatccaccaccttccgttacgcgctggcctgcatgagcaccaccgcccaccactacgtggcgcccgcccgccgcgacgatgtgctgcgccacgtggccgccgaactgtggactctggccaacgccgccgaagccggctcggacacccagttccagctcgtcaccgcctacttgggctacggtgaggagggcgacgccgcattcgccgccaacgcacacggtctgctggacggcaccgtgcgtcttgaaggcctcgaaatcgacaacaacttcacgtggaccatcgtccaagcgctcacctccgtcaacgagatgaccaacgacgacgtggacgcgcagctcgccaagaaggagaccacggaaaaccgcgagttcgcctacggcgcccgtgcctccatggccaccgctgaggccaaggaatgggcttgggatcaggcgctccacaacgacgagctgaccaactcccagctcgaggccgtggcccgtggcttctccgccaccccgcgctccgatctggccgagccgttcgccgccaagtacttcgagactgtggactgggtctgggccaacaagacctaccacatggccgacgccctgctcaacggcctgtacccgggctacgccgatcccgccacgctggtcaagctcggtgacgcctggctggacgagcacattgccgccgacaatgccctgaagcgtctgatcgtcgaaaacgtggcatcctcccaccgcaccctcaaggttcgcgaatacaacgaagcgctctgatttccttctggctcccctcgggcgcgaggggagctgtcgcctcaggcgactgaggggagtcgcttccgcgagaagctacgtccacattccaacataaaacccgcaaccaatcctcaacagcgtattctcgctcaaggccggcaatatgccggtcgatgagcgacaaggatacggggaatgattgcgggcttttccataacttcattactgctgattctgttggccggaatcggcgcaggattcgtgggctatgcggtaggcgcatcgtcactggtctcatacccggccctgctcgcgttcggcattccgcctgtattggcaaacgcttctaacaccgttggcgtggtcggcacgggcatcggtggcgtgatgggtgcgcgcaaagaactcaaaggccaagcggtacgctccattacgtatgtggtcatcggcgcattcggcggggtggccggtgcgtttctgttgctcaaactcgacccgagtgtctttgaatttgccgcaccagtgctgattttgctgagctcgctgatcatcgccatcaatccgcgcggccgcatgcaggccaagcaagccgccgcggatgccaccgcgcaactcaagcacatcgaagccactgaagccactgaagccgccaagcgcgcaaccacccctaccgcacctcaccgcccgccggaacaactcgtgcagcccatgagtcaggattcctggtgggtatggctgggcgtagcggcggtcgccatctactccggctacttcggcgcgggcgccggtaccttggctctcgccgtgcttgatgccgccaaaatcggcccattccacaagatcaatgcattgaaaaccctgatcggcacaggcgcgaacatcagcgcctcagtggtattcatcatccaaggcgcggtcgattggccggccgccatcatgctgtgcatcggatgcttcatcggcgggtacatcgccccgtccatcacccgcaagattcccgcaaacatcatgcgcgccgccgccgtaatcgccggcatcattcttaccatcgatctggggctcaaaacctattgattcgtgccttacactgatgcagtgaagcatacagcatggccgtcaaccgcagcgtggtcgcagaccccgataaggtggccaatgtctggcatttggcgactgcggaacctgagcgcctagaaaccagcgcggcaggcgaagcggtgaacgacttcctcgatccgccagacacgtcgcagattcacggcattgcgtgtcatgctgattggcggttcgcggcgcgagcaggtgctgttcgccggcgttatgaaggagctactcgcgcccatcaacaatccgcgatatgtcatcatcggtaaggaatggggcgtgcgcgcttactgcgtgagcttcccctgcccgtccgtatttgcccgccgccagcaggacgccgagatactgagccggcagttggaccgctgcctgacgcattgcaccatggtatacgcccgcactgaggaaggtcggcatacgctacttcgctgccaaacgcgttctttcctcaaccgcgacgagcaactgccgcacatactgaccacaacatcggagtaatagatcgttgcattcatggccgagaccaccccggtagaggagatgccgttgggcatgttcatcgcatggctcagcgtgttcctcgccgtcgttctgtttggtgttgctttgccggttatcgatgtacgctgggtagttccgttcgtcgtatttgccgctgtattgtttacaggcgcgtttgccggcccgttcttactagtgcgatggcttcgttcccgtgccggagtgcatcggtccgtccggcatgcccgctaacgaatgtatctcatcattcatccgccgaacaagatgaatatgcgggtttgtgggtgatgccattgcggctgttgaatgctgatttccggttctggagcagattccgtggcggttttttgccgagtcgggtcctagggtggagcacaacgactacgatggtgcgggtaacgcgatacaaggagtggaacttcatatgccgaagatgtttggaaccgatggtgttcgaggactggccaatagggatttgaccgcacgtctggcgttggatttgggcgatgccgccgtgcgtgtgctcggcgacgccggcacccaagacgatcagcctgaggggcgccgccgcgcgctcgtgggtcgtgacacccgtgtgtccggcgattttctggcttccgccctgtctgcgggcatggccgccggcggattcgacgtgattgacgcaggcatcatcccgaccccgggcatcgcgttcctgaccagcgtgctcaacgttgagatgggtgccgtgatctccgcctcccacaacccgatgcccgacaacggcatcaagttcttcgcacgtggcggcttcaagctgcccgaccagaaggaagacgacatcgaggccgtgctcggccaggactgggaccgcccgaccggtgccggcgtgggccgcgtgagccacgaccagaccaccgccaccaacctgtacatcgatcatctggtggccaccatcgctccgctgaacgatgacaaaacccagcccaagccgctcaagggcctgaagatcgtggccgactgcgccaacggcgccacttccgtggtggctcccgaagccctgcgccgtgccggtgcggatgtaatcgtgatcaacgcctcgccggacggctacaacatcaacaagaacgccggttccacccaccccgagcagctgcaggccatggtcaaggccaccgatgccgtgatgggcgtggccttcgacggcgacgccgaccgttgcctcgccgtggacgaagacggcaacatgatcaacggcgaccagatcatgggcattctggcccgtgccaagcagcgcgaaggcaagctcaaccacgacaccctcgtggtcaccgtgatgagcaacctcggtctgaagctcgccctgaaggacatgggcatcaagaccgtggaaaccgccgtgggcgatcgttacgtgcttgaggaaatgctcaagggcgattactcgcttggcggcgagcagtccggccacgtgatcaaccgcgaattcgccaccaccggcgacggcaccctgaccgcactgaccctgtgcaacgaggtcgtcaagtccggcaagagcctgaaggagctcgccgccgacttcccgcagctgccgcagaccctcatcaacgtgccgaacgtggacaagaaggccgcctccaccaacaagcgcatccaggatgccgtggcccgtgaggaggaactgctgggagacaccggccgtgtgctgctgcgcccctccggcaccgaaccgctcgtgcgcgtgatggccgaggccgccacccaagcctacgccgacgaagtctgcacccgcctcgccaagatcgtcgccgaagaactcgcgctgtagcacccttccctaaggaaaaaaacaatgtttggaaagaacgccaaagtcgacctcgaactcaaccgtgatgtcgaacaactcatcaaaaccggcggcaaggagaagctcctgcccatcgtgcaggccggcgaaccggtgttgcgccaacggacagtggcctataatggccagctttccaagcgtacgctcgccaaactcatcgatacgatgcacaccaccatgctggaggcacccggcgtggggctcgccgccacccagatcggcttggggctcgcgctcgccgtggtcgaagaccacgtgcgcgacgacgaggatgatccgcgcgaaatcgcggaatttcccttccacgtgatcatcaacccgagctacaaacccaccagcgacaaaaccgcctcgttctacgagggctgcctgagcttcgacggataccaagctgtgcgcaagcgttggctcgacatcaccgccgaatgggatgatgaagacggcaaacaccacagcgagccgctgcacggctggcccgcacgcatcttccagcacgaaaccgatcatttgagcggcgagttgtatatcgatcgcgccgaaatccgttcgctgaccaccaacgagaacctcgaggactactggtgcgaagacccggtgcccaccgaggccgctgaagagctcggtttcgcactatgaccgaccgtgcatggttcgacgccgccaagggagacattccccaatgggcggcgtccatgcccaaggacgccgatggcaccaccatcgactgggactgggtgcgttctctggacctggcgcatggcgtcggcacaataccggaatccaccccacagtccatccacgacgcattgaaggccgactacgccacacgcgagcgtctggaatcgatcatcgcccaatgcaacagcgcattcatgaccgatttcgaccggttcatcggctcctatcgtctgcctcgcgcgctcgcctacgccaatcgtcggctcaacgacaacatcaacacgctgttgcatctgggcgaacagcaacacctatgggcggtcagtcgcgaacggcgggggagggtcaccattgccgtgctcaagccgtactccggcagcggcccgtcgaacgatgaccaaggcatgctggatctgagcggcgaagccggtggcacatctgccggaaacactgccgccgaaaacagcgatgtcaagttccccacaacagtcgccttggacgatgtccaagatcgtacggcggcgattcttgacgcacgcgccgaacggcgtaaggcccagcgcttccagaagcgggcgggcgatgcggcgatggcccgcgccaatctctccggcgcgacttcgccgggtggtgccgctctgccgggtggtgccgccgcgtctggcaacgctaccggacaccatcccaagcccgactggcgcgacgcctacctgcccggccgcgacatggatgcggtgatgggcatcgacatcgaaaccaccggcatcgatccggcacgtgactacatcatcgacgtcggcttcgagttcatgaacatggccagtccgcgcccggccggcgaacccgagacatacgcctatgagcagggctattacgccgccggcgacgcctacggccagtcccgcctcgcttttggcgtgccgccggaaaacgcggcgctcggcaacgccctcatcgccaaactcaccggcatcgatgtacgcggccgcagcagcgaggccgggtaccgactcttcgacgaatggccccaagcccaggccggcctgctcgcgcggcttacccagcagccgtacgtggcgcataacgccaccttcgaacatagctggttcatgctgaacgtcgccggatacgcggaaagctaccgcgccgggcgcatcaccatcatcgataccctgccgatgagccggcagtgggaccccggcgcggtacccaccaacgagcatccttacggagacaacacgctcgacgcctacgccaaacgtcagggcgcgcttgattccgcccacaacgaacgccacctgggccttgaggattcgcacatcatgctggtggccatgaaacaccatctggcggcgctgaaagcgcaagggaaagggccgtgggggtccaccggcagggcgggcgtcggcggcaagtcctgcggtcgtaagcggtgagtacactattggtctcgtgagtaactatcaggacagccgacagcagcgtgagaaccgccgccgcaccatcgtgcgtgtggtgtgcgtggtcatagctgtggccatgctcggctccctggtcatcccggcgatttacgcggggctttgacgttgccttcgcatattcgtgcccgcagttgaacacgtctgatgcgagggattcgtgaggtcgcccggccggttatcggcaaggcaggcccggaaccttctgacagcatggattgcaggcggatgcgcgtgtggcgcggcaatgcccgccaacgccagaggaatgtgcgaaggctgtcaacaaggacgtgacttcccaaggaatctcaaagaatcaacagtaaggtaaaccacgatggcagaatttgactttacccaggcgatcggcgaagcccgcgccaaatacgaatccatcgccaaggcgctggacgtcgaccgactcaaggccgatatcaaggatctcgaaacgcaggccgcggccccgggcctgtgggatgacccggaaaacgcccagaagatcaccagccggctgtccgccgcggaatcgcagctgaagcgtctgaactccgcctcccagcgcatcgacgatgtggaaacgctcgtcgaactcggccacgaggagggcgatcaggactctctggacgaggcgcaaagcgaaatcggcgagatccagaaggatctcgaccagatggagattcagaccctgcttgacggcgaatatgacgaacgttccgccgtggtgaccatccgctccggtgccggcggcgtcgacgcggccgacttcgcgcagatgctgctgcgcatgtacctgcgctactgcgagcgtaacggcttcaaggccaaggtcatggacacctcctatgccgaagaggcgggcatcaagtccgccaccttccaggtggacgccccctacgcttacggccgactgtccgtggaaggcggcacccaccgtctggtgcgcatctccccgttcgacaaccagggtcgccgccagaccagcttcgccgccgtggaagtggtgccgctggtcgaggccaccgatcacatcgacattccggatacggacatccgcgtggacacctactgctcctccggccccggcggccagggcgtgaacaccacgtactcggccgtgcgcatcacccaccttcccaccggcatcgtggtgaccatgcaggatgagcgttcgcagattcagaaccgcgcctccgccatggccgtgctccagtcccgactgctcgtgctgcgccacgaggaggaggccaagaagaagaaggagctcgccggcgatatcaaggccagctggggcgatcagatgcgctcctacgtgctgcacccctaccagatggtcaaggatttgcgcaccggctacgaaaccagccagacccaggccgtgttcgacggcgacatcaacgcgttcatcgaggccggcatccgctggcgccacgaacagcgccgcgccgccgaaaccgaggagtaagcagcattatggcgctgatctcactggacaatgtgtccaagatctatcccaaaggcacccgaccggcgcttgacgacatcaacctcgatatcgaacgcggtgatttcgtgttccttgtgggtgcgtccggctccggcaagaccacgctcttgagcctgctgttgcgcgaggaagaggccaccaacggcgagattcgcgtggccggcaacgatctgcggcgcatcaccaaccgtcaagtgccgcagtaccgccgttcgctgggcttcgtgttccaggattacaagctgctcaataacaaaactgtgtgggagaacgtggcgttcgcccttgaggtgatcggcacacggcggtccaccatcaaatcgttggtgcccaaggtgctggataccgtggggctcaccggcaaggaaaagaactacccgcatgagctctccggtggcgagcagcagcgtgtggccatcgcccgcgcctacgtgaaccacccgcagattctgctggccgacgagcccaccggcaacctcgacccgaccacttcgctgggcatcatggaagtgctggacgccatcaaccgcaccggcaccaccatcgtcatggccacgcataacgaagagatcgtcaactcgatgcgcaagcgcgtggtcgaactgcacaacggcaagatcgtgcgtgacgaggctcatggctcctatgattccgccctgttcttcccggatgccgaagtcgaagccaagtccgacgccgcccatcatgtgctggcggcggcgaccaaggccatcgagggcagtgacgagccgtccgaaggcatcgcccgtctggccaactccgtgcattccggccgcaccggccgctatggcgagacgttcgctccgctggaagacacgctgacctggggcaagggcatcccgttggacgagcaggccgccgccctggaaagcacccaggcgttcgacccgttcaatgacgagtccggcgagaccgccgcggttgccgatacgtccgtgtcatccgccgccgagccgccggccccgccggaaccgcccgagccgccggccccgccggaaccgcccgtaccgcctgtcggcgagcagtccgccgcagaccaaacatccgacgatcaacccgctgagggcgcgaaggagtaagggggatcatcatgcgagcacgattcattctgtccgaaacgtgggccaacctcacccgtaacctgtcgatgctgctgtcgctgacgctggtcaccttcatctcattcctgttcatcggcgcttcggtgcttactcaggcgcagatcaccaaagccaagggcgactggtacgacaaggtcgaggtcgtggtgtggctatgccccgacggcaccagccaatccgcgaactgtgcttccggcaaatcgccctcagccaatgagatcacggcactgcagaaaaccattcgcgatgaactcaacgacgtggtctccaacatcgactatgtcagcaagcaggatttctacgacaacaccttcaccaagcagtacccgaacggtgaattccaaggccgtacgctgatcgcggacgatatgcaggactccctctggctcaagctcaaggaccccaccaaatatcaggtggtctccgaagtgctctctggcaaggagggtgtggaagacattaccgatcagcgccagatcttcgacccggtgttcgccgtgctcaaccgagccacggcggttacggctgtgctcgccggcgtgatggtggtggtcgccatcctgctgaccggaaccaccattcgtatgtccgccgcatccagacgaaccgaaaccgaaatcatgaggtacgtgggcgcctcgaactggacgattcgtctgccgttcattctggagggcaccatcgcctcgctgatcggctcggtgctctcgtgcctgatgctttcggctatcgtcaacgtgttcgtcaccggctggctggcgaaatccgttacatggattccttatgtgaatcagctcacggtactggtgatatcgccgttcctggttgtgggcgcgatactgctgtccatcatcgcttcaaccatctcgttgcggcgttatttgagggcgtaacgcgaccggcttacccgcgagaaatgtgatgacatcgtgtgcgagcctctcaggttcgcatgttatggtattggcttaagtgagcgaaaggactattcacatatgacgaacgtacgtgtgatcaagcccgcactggcggcactggtggccgccgcagcctgtgtgggaggtctggcgttcagctcggcacagcctgcccaggcagacacctattccgacctgatcaatgcgcagaaccagcacgccgcgtcggtacagcgcgaggccgaactcaagcagcagttggccggtgccagccaggaactggcggataaggtacttgagctggacgatctgaccaacaacaagattgtcgccgcgcaggccaaggtcacacaggccaacgaggatgccgccaccgctcaggacgaggccgatgccgcatccggacgtctttccgccgcgcagaaagacaaggagacgcttgaggagcagatcaagcagaccggcaaggactacgatgacgcgcacgccgccgtggcccagctggcccgtgacgagatgcacggctcgaatgcttccgacgtgatgagcgtggtgacgggtgccaccagcacacaggacttcgtcaattccatgcagtcccgggacgcgttgtcccgcaacgaggcgaatgcggcttcctccgccgcgacctcactgagcacgtcgaagaatcgtggcgagcgcttggcggccatcgaaaagcagatcgctgtgctcaagacccaggccgatgagaaggccgcttccgcacagaccgccgccgaaaccgcgcaaagcgaacgtgacgctttggataagctgcgccaggaaggcgaagcaaggcgtgacgaactgtcttccatgatcgacagtctggattcccaatccgccaagcaggcggcccagaccgtactgatcgcttcccaggtcgattcctacaatcgtcagtaccagaaggaacagcaggacgccgccaaccgggtggataccggtaaccagggcggtacgccgtctactccggtgactcctactcccgctcccacaccgacgccgacccccactccgacggttcccggcggtggcggcagtagcagcggcggccaaggcacgtcgaacggtgattacggcaacgcctatgccgccggccagtgcacgtactgggcgtatgaacgccgtaggcagatgggcattggcacgccgtcctatctcggcaatggcggcgactggtggcgcaacgccccctcgtacggcttgcgcgtggaccacaaccctcaggtcggtgcggcgctctccttcctgcctggccaggatggtgccgacggtacctatggccatgttgccgtagtcgaagccgtgtatggcgacggcacattccagatctccgaaatgaactggggtggtccgtggaacatgcactaccgcaccttgaccaatttgggtcagtactggttcgtccactgaccggttggttcggccgatatatacggttgaagggttcctcttgaagaggaaccctttttcgtattcgaggccggtccgtgatatcgtcggatgttgcgttgctacccacgagttgctacccacgagttgctacccacgagttgctactcacgagttattgcccacgaaaggaggagacatgcccaaggaaaccggtgagaaactcatcgtccagaacaagaaggcccggcatgactatgccatcgaagacaagtacgaggcagggctggccctgaccggcaccgaggtcaagtcgttgcgcgaaggccgcgcatcgctgtccgaggcgttcatctccatcgaccgccgtggtgagatgtggctggagggcgcgaacatccccgaatacctgaacggcacatggaacaaccatgcgcccaagcgcaagcgcaagctgctgctgcaccgactgcagatcaccaagctcgcccgcggcatcgaagccaagggatacacgattgtgccgctgagcctgtacttcaaggacggtcgcgtcaaggcggagatcgcgctggcccgaggcaagaaggaattcgacaagcgccaggccctgcgcgaagagcaggacaagcgcgaagccctacgcgccatgcgctacgccaacatgcgccactagtcccgccccttggctcccctccggaggggagccaagagtaggatgtccgcgttgtgggtcatttcgcccacgattaacgcttccgtagcattgcactcctacgctctggaaccatctgggaaacatacccgcccagctgactatccggagagaggaaatccaatgtctctaagcaagggaatacaatccgctgcggccgccgccctgagcgcggccatgctgatcgccgtggcggcctgtggcacgactgacagcaccgacaccgcatccaagagcggcgattcatccaaggactcgtccagcacttcgattcaaggcttcgacaccagcagcatccagaaggacgacgagattgccgcactgctgcccgattccgtggccggcgacggtacgctgaccgtcggcaccgatacttcctatgccccggccgagttcctggccgaggacggcaagaccccggtcggctttgatgtcgacctgtccaaggcgctggccgcagtgttcggactgaaggaaaacaccgtctcctccacgttcgattcgattatcccgtccgtcggctccaagtacgacatcggcatctcctccttcaccgtgaccaaggaacgcatggaggctgtggacttcgtgacctacttcaaggccggttccacgttcgtggtgcagaagggcaacccgaacaaggtcgactcctcgaacctgtgcggcgtgaaggtggctgtgcagaccggtaccacccaggaagaggaagtcaacaaggataacgagcagtgcaaggcggacggcaaggatgccatcgacatccagtcctccaagctgcagaccgatgtgaccaccgccgtggcttccggcaaggcctccatcttctacgccgattccacggtgtccgcctacgccatcaagcagaccggcgacaccttggagacgctcggtgaagacgccggcggggtgcccgaggccgtggccatcaagaagggcgataccaagaccgccgaagccgtgcagaaggccatccagaagctgatggacgacggcacctacaagaagatcctcgacacttggggtgttggttccggtgccatcgacaaggctgagatcaacccggccgacgccgcctgattgccaggtgtccctgttcgttcccgctggcgggagctgtcgccgaaggcgactgagggtggtctgtagcataacagccaccagcagttgtattcttatgcggcggcctcccagcgggagcatttgtatatgtatacgctataatgtatatttatacctgattgttgatagtcgctatagggcggctccacagagaagaagagagagatcatgcagttcaacaagctgaagaccattgcggccgccgccttgagcgtggccatgctgttctccgccgcggcttgcggcacctccgacaaggcgggtgactccggttccgataagggcggttcctccaagtcggtcaccatcaccagctacgacgtgagctccgtgaagaaggacgatgcaatcgccgcactgctgcctgaatccgtgaccaaggacggcaagctcaccatcggcaccaacccctcctacgccccggccgaattcctcgacgccgacggcaagacccagatcggctacgacatggatcttgcccgcgccatgggcaacatcttcggtctcgataccgaaatcgtctcctccaacttcgatacgatcattccggccatcggctccaagtacgatctgggcatcgccgccttcaccatcaccaaggagcgcatggaatccgtcgacttcgtctcctacttcaccgcaggcatgggctatgcagtggccgcaggcaaccccaagaacgtcgatgagaacgacctgtgcggtctgaacgttgccgtcgagaccggcaccgtcgaggaagaggccatcaacaagaccgccaagcagtgcaaggcggacggcaagaaagacatcaccatccagtcctccaagcagcagaccgacgccaccaccgctgtggtgaccggcaaggccgacgtcttcttcgccgattccccggttgtcggctacgccattgcccagaccgatggtcagctggaacagctcggcaaggacttcgatgaagtgccgaacgccatcgccatcaaaaagggcgattcccagaccaccgaagccgtgcagaaggccatgcaaaagcttatggacgacggcacctacaccaagatcctccagcactggggcgtcgaatccggcgcactggacaaggccgaaatcaacccggccgtcgaatagccgacaagctgtcgcgaaaattcgaatggggcgcactgtttgtaacacagtcgccccattcgtacactaaggttcaacgctagttgcaacttgcagttcaggctgcccaacacgtccaaggaaccaaattatggcgaagaaagaagtcgacggtgagggagtgaacatccccaaccgcatcaaggcgctgccggtcaagcgccccggcccgattgtggccgcagtgatcgtggtgctgctcgccgcgatgctcattcaaggcttgattaccaatccgcgactggattggcccaccgtctggaagtacctgttcaacgagaacgtgcttgaaggcattcgctataccttggagctcaccgtgatctccatggtcgtggcgatcatcctgtcggtgattctcgccatcatgcgcaaatccatcaatccggtgctgcgcggcgtcagctggttcttcatctggttcttccgcggcacgcctgtgtacacgcagctcattttctggggtctgttcgccgtgctgattcccaagattagcctcggcattccgttcacctcggtggagttctggagcatcgactccaacgtggtggtcaccgcattcaacgccgcatggattggtttggctctgaacgaggccgcctacctgtccgaaatcgtgcgtgccggccttgaagccgtggaccccggccagaccgaggcggccaaggcattgggcatgaaccgcacgctcatcatgcgccgcatcgtgctgccgcaggctatgcgcatcatcatcccgcccaccggcaacgagaccatcggcatgctgaagaccacctcgctggtcaccgccgtgccgttcaccctcgaactgcagttcgccaccaacgccatcgccaaccgtatctacaagccgattccgctgcttctcgtggcctgcttctggtacctgctgatcacctccattctgatggttgtgcagtcccgccttgaggcgcacttcggcaagggcttcaacgcccgcccggtgggcaccaagggcaagcagccgccatacgatccgccgtaccccggcaagtctgacggcgagccgaaggacgatgtgaacaaaatcaatcagaccaccttcgctgggctgaatgcgtaaggcgggagcgagaattatgactacgaacgacatcaccaactccgctccggtcgtgcgcaaggcggttgacggttccgtgattcctgctgtcaaggccgtgcaggtgcacaaggcgtttgggccgctgcatgtgctcaagggcatcgatctaaccgttatgcccggcactgtgaccgtgattctggggccctccggttccggcaagtccacgttcctgcgtctgatcaaccagctggaaaccctgaccggcggttccatcgaggtggacggcgaactcatcggctacaagcacgtgaccaaaaacggccaggacatgctgcagaccctggacgataaggagatcgccgcacagcgttctcgcctcggcatggtgttccagcgcttcaacctgttcccgcacatgaccgcgctggaaaacgtgatggaagccccgattcacgtgcagcaccagtccaagaaagccgcccgtgacctggccgtggccgagcttcagcgcgtcggtctgggcgatcgcatggactattacccctcccagctgtcaggtggtcagcagcagcgtgtggccattgcccgtgctctggccatgaagccggagatcatgcttttcgatgagccgacctccgcccttgaccccgaactggtgggtgaagtgctcaacgtcatgcgttccttggccaaggaaggcatgaccatggtgtgcgtgacccacgaaatcggcttcgcccgcgaagtcgccgaccagatcgtgttcatggacggcggcgtagtcgtagaaaagggcggccccgacatcatcgaccaccccaccgagcctaggtttaaggacttcttgcagcacgtgctgtaggaaggctcgttgttgcagctccaaaaacgtacgctgatgaactcagcgtacgtttttttgcgacgcctaatcgcacccccatctcgtgaagaacgtacgctgagtggtagtcagtgtacggttttcacgaaggggcatgttccaatcctgcaaaggcggcgggttggattcgctttgcgcaataatcgtccgctaggctggtgaaccatgtgtggaatcgttggatacgcgggaaatattgaaacggcatgcggcaagcctttggaggtctgcctgcaaggcctggaacgtctggaataccgaggctatgactcggccggtgtggcgctgaccgcgcccggcatggataaggtggtcgtgcgcaagaaggccggccgtttgaagaacctggtcgaagacatcgagcgtaagccgatgccgcttgccacggtgggcatcggccacacgcgctgggccaccaatggcgagccgagcgacgtgaacgcccacccgcacaccagcatggacggcaaggtggccatcatccataacggcatcatcgaaaacgcctctcagctgcgtctcgacctgcaagccgaaggctaccgattcgcctctgccaccgacactgaggtggccgctaagctgctcggcaagatcgtggacaagattatcgcggacgaaggcaagccagacctgttcaaggctgtgcgccgcatggcccgcatgcttgaaggcgcgttcaccattctggccaccgactgccgccagccggacatcgtggtcggagcccgccatgattcgccgctggtcgtgggccttggcgagggggagaacttcctcggttccgacgtcgccgcattcgtggcctacaccaagcgcgccatggaagtcgaccaggatcaggccgtatgcgtgtccgccgacaaggtcatcgtcaccgatttcgacggcaacgtggtcgaaaacccgaagacctacaccgtggattgggatgcttcggccgccgaaaagggcggctgggattcctttatggacaaggagatccacgaagaccctgccgcagtgcagcgcaccctgcttggccgcttcgatgcgaatggcggcatcacccttgatgaagtgcgtatcgacgaacacgacttcaaggccatcgacaaaatcatcgtcgtggcctgcggcaccgccagctacgccggccaggtagccaagtacgccatcgaacactgggtgcgtatccccgtggaaatcgaactcgcgcacgaattccgttaccgtgacccgattctgaccccgcgtacgctcgtggtggccatttctcagtccggcgaaaccatggatactctgatggccctgcgccacgcgcgcgaacaggggtccaaggtgctggccatctgcaacacgcagggtgcctccattccgcgcgaatccgacgccgtgctctacacacacgccggcccggaagttgccgtggcatccaccaaggcgtttgtggcgcagatcaccgccgcctacctgctgggcctgtatctggcgcaggtcaagggcgcgatgttccgcgatgagattcatcaggtgcttgactccctgaaagacatgccgcgcaagattcagtgggtgctcgacacccagcccaagaccatccaggcggccgccgagcgcatggtgaacgccaactccttcttgttcctcggccgtcacgtgggctacccggtggcgcttgagggtgcactgaagctcaaggagatcgcctacacgttcaccgagggcttcgcggccggcgagctcaagcatggaccgatcgcgctggtggacgagggtgagcccgtggtgttcatcgtgccgccgcagcgcggccgcaatgtgttgcacgccaaggtgatctctggtatcgaggaggtcaaggctcgtggcgcgtacatcatcgccgtggccgagcagggcgacccggatgtggaacggtacgctgacgtggtgttctggcgccccgcctgcccaacgctgatgagcccgctggttgacgtggtgccgctgcagctgttcgccatggacatggcaaagctcaagggctacgacgtggacaagccccgcaacctcgccaagtccgtgaccgttgagtaagccacatcggtatgtgattgacgagcctcatattccgtttgagatggacgtgctgtatgaggacgagcggatcatcgtggtggacaagccgcattttctggccaccatgccgcgcggcatgtggtatcggcagaccgcgctgatccgattgcgtgagcggctgggggagccggacatcacgccagcgcaccgattggaccgcatgaccgccggcgtattggtgttcgtgcgggatccggcctgccgcggcgcgtatcagatgctgttccagaaccggcagaccgtcaaggtctatgaatgcctggcgccctgccggccgatcagccgcccgcgattcggcacgatcatgcaggtcgagccgccacgcccgttcccattgctgcgccgatcgcacatcaccaaggaacacggcacgatggccgcattcgaggaaccgggtttggccaacgccgaaaccctcatcgagcgcggcgacctctgtttccctcccgctgacgggaggtggcgcgaagcgccggagggtggtccccatccggggaatcaccccatctgccgctacacactccacccgcgcaccggcaaaacccaccaattgcgcgtccacatgaattcgctcggcctgcccatcgtgggcgacgacttctacccgcgcatccagacgcgcccctacgacgatttcagccaaccattgcagttggtagcacgcatgctgcgattcaccgatccaataacaggcgagaagcgcgaattcgtttcccgtgtgccgcttaagatctgatttcttatgcattgagagtgttttcgctcatggtgtcaccattcatagagttcggcgggctgcggggttttgcggacatccagcgacaagccaagctcagtcagggcgctgagaatggtggagaattcgggattggggactcgggcgtgttcaaattcgatcagccagcgacgtgacacgcccagccgttgggccatgtcggtctgactaatgccctggcgttgcctatgaatcactggcaggtggatcactggcaggtaccagtggatgccagcgcatgccgctcgtcagctgatgtcgagcacggaaccgcgttcaatcagttccggcgggattacggttttgacgccgaccggtatcttctcgccttcgcattgacggcggaccatggagaaggcggtggcgccaatgtcgtcaaagcgcagcttcatggtcgtcaggttcaagcgcgggaccatatcgaccagcgaatcatcgacgcccacgatgctgacatcctcgggcacacgcttgcccactgactgcaacccgagcattgcgccgtacgccatctggtcgttggcggcgtagatggccgtgcagtcggggtcgtgggccaacgccacgccggcctggtagcctgaatccgcgcaccaatcgccgatatacatgctcggtacgcgtgctcccatttgttccaacgcttctcgccaaccgcgggcgcggctttcggcggcacgcgaggtggacggtccggcaatgtggtagacggtcttgtgtcccttgctcatcaggtaatcgacgatagcggtcgagcagccatactggtcggcgtcaacagtggggcagtggtcggcggcggattcgcagatgagcacgactggaagttctcgcggaggcttgtatccgacgaaatcggagatgcgttcctccagcactacgatgacaccatccaccggctgacgctgcatgtgatcgatggcggcggaaagcgtgcgttccgcaccgtgacgcatggtctggatggtgactgaataatcgtcatcggccgcgttggccacaatagaatcaaggatgcgggcgttgccgaacgtggcggtgttgaacatcaccacgccgatatcctggaagcggccgtgctttagggctcgggccgcataattcggacgatatccaaggcgctccattgcagcttcgacacgctggcgtgtttcgggtttcaccgcatcgctgccattcgccacgcgggacactgtctgtggcgaaacgtcggcggctttcgctacgtcttgcatggacacctgtgttggcctcgacatttcaccctcgcttgactcattaatgtcggtgtttcgtttgcagcgcttgtcttaggccgcttacgttaacgataacatcgttgttttcgtgaccattgtagcagagtgactgaggaacccttaattcaacacggtactcaacgcgattggacaatgttacagatagtgttatgatgataacgcaaacattttggtcaaccttcgaaggagaggggttggaaatggcttcagccgatatcgcagctgcgcccgtgcattcgggcaaggctcgtgtgaataagcacaaggccgattggcgtggatggaagttcatgtggccttttgcggtggtgttcgtgttcgtgttcatcgtgccgatcgtgtatgccgtctatatttcgttcttcaagaagcagatgatcggcggcaccaagttcgtgggcttcgagaactacgtgcgcctgttgggcgatggccagttctggagcagtgttggtcgtgtggctttgttcacgtgcgtgcaggtgccgatcatgctgtgcctgtcggctttgatggcgttggcgctggattcgatgaagttgcatggcacgaagttcttccgcatctccaccttcctgccctacgcggtgccagctgtggtgtcgactttgatctggggtttcgtgtacggcgcgaagtacggcctggtgggttcgttgaacgatttcctgggcacggacatcgacgtgctcgccccttccgtgttgttggccagcatcgggaacatcgtgacgtgggagttcacgggctacaacatgctcatcttctacagctcgctgtcgaccatcccgcattccctgtatgaggcggcgagcatcgacggcgcgtcggagtggcagatcgtgaagagcatcaagcttcccgaattgcgcggcagcctggctatcacggtgatcttcagcatcatcggctcgttccagttgttcaacgagccgagcattttgcagaacatggttcctggtaatgcgatcacgacgtattacacgccgaacatgtacgcgtacaacctgagcttcagcggcaaccagtcgaattatgcggccgcgttggcgatcgtgatggccgtgatcaccatggccatcgcctacatcgtccagttgaacagcctgaaggagcagatgaagtgacgatgaccgctgttcgtgttgaggaatcgatgatgatcgtgaaggagcgtatgtgatgagtgcagcaacgacttcggccgccggtcgcctgaccgacgccgagctcaaggcccaggagaaggccgccaggaaggcggagaaggcccgccagaagaggatcgccgccgacgaggccgccgaacgcaagcgcagcgcgaaggccgggttcgcgaacgtgaacaacccgaggcgttccacgttgttgaccgtcctgtgcgcggtcttcgccgtgtactgcctgttcccgttcgtgtacctgctgatcaacgcgacgaagacacaggccgacttcacgagcacgttcggcctggggttcggcaagacgttcgctttgttcgacaacatcgcgaccgtgttctcctatcaggacgggatcttcgcgcgctggctgttcaacacgatcctgtacgtggtggtcggcgccggcggcgcgaccctcctggcgatcatgggcggctacgcattggcgaagttccgcttcccgggccgcaacgcggtgttcgtggtcatcatcggcgcgatcagcgtgccgggcatcgctttggcggtcccccagttcctcctgttcgccaaattgggtttgacgaacaccccgtgggccatgattataccgagtttgatcagcccgttcggcctgtacctgatgtggatcttcagcgagcaggccgtgccccaggagctgctggaggccgcccgcgtggacggtgcctccgagttccgcacgttctggcagatcagcctcccgttgttggctccgggcatcgtgacgacggccctgttcacgatcgtggcgacgtggaacaactatttcctgccgttgatcatgctcaaggacgcggactggtacccgctgaccatcggcctgaaccagtggaaggaccaggcgagcacggccggcggccaggcgatccagaacctggtgatcacgggctccctgatcacgatcatccccttggtcatcgcgttcttgtgcctgcagaagtactggcagtccggcctggccgcaggcgccgtcaaggagtgagcgtactttggctcccttctggtggagggagccgagataaaggcataaccactaacagaaggaggcacctatgcagatattcgcattgttgagaattgtgcaggtgcctccttgtgtgtctgtgcaacgtgaggaatttattcccgtagacgcagattatcgataaaattcaataaaggaactgaatcatcatggaacgtaaagagttcaagtggccgcagcctcttgcgggcaacgagccccgcatctggtacggcggcgactacaaccccgaccagtggccggaggaagtctgggacgaagacatcgagcttatgcagcaggccggcgtcaacctcgtctccgtagccatcttctcctgggccaagcttgagcccgaagaaggcgtgtacgacttcgattggctcgatcgcgtcatcgacaagctcggcaaggccggcatcgccgtcgatctcgcctccggcaccgcatccccgccgatgtggatgacccaggcccacccggagatcctctgggtcgactaccgcggcgacgtctgccagcccggtgcccgccagcactggcgcgccaccagcccggtcttccttgactacgcgctcaacctgtgccgcaagatggccgagcactacaaggacaacccctatgtggtctcttggcatgtgagcaacgagtacggctgccacaaccgcttcgactattccgaagacgccgagcgcgccttccagaagtggtgcgagaagaagtacggcaccatcgacgctgtcaacgacgcctggggcaccgccttctgggcgcagcgcatgaacaatttctccgagatcatcccgccgcgcttcatcggcgatggcaacttcatgaatccgggcaaactgcttgactggaagcgcttcagctccgacgccctgctcgacttttacaaggccgagcgcgacgccctgctcgagatcgcccccaagccgcagaccaccaacttcatggtctccgccggcggtgccggcatcgattacgacaagtggggttacgacgtggacttcgtgtccaacgatcactacttcacgcctggcgaagctcacttcgacgagctggcttactcggcctccctatgtgacggcatcgcccgcaagaatccgtggttcctcatggagcactccagctccgccgtcaattggcgcccgatcaactatcgcgtcgagcccggcgaattggtgcgcgactccctggcccacttggccatgggctccgacgccatctgctacttccagtggcgccagtccaaggccggtgccgagaagtggcactcttcgatggttcctcacgcgggccccgactcccagatcttccgcgatgtgtgcgagctgggtgccgacctcaacaagcttgctgacgagggcctgctgagcaccaagctggtcaagtccaaggtcgccgtcgtcttcgattacgagtcccagtgggctacggaacacaccgccacgcctactcaggaggtacgccattggaccgagccgctcgcgtggttccgcgcgctggcggacaacggtctgaccgcagacgtggtgccggttcgcggcccttgggacgagtacgaagccgtcgtgctgccgagcctgaccatcctgtccgaagagaccacgcgccgcgtgcgcgagtatgtggcgaacggcggcaagctgttcgtgacctactacaccggtctggtggacgacaaggatcacgtctggctgggtggctaccccggttccatccgtgacgtggtgggtgtgcgcgttgaggaattcgccccgatgggcaacgacttccccggtgccatggaccaccttgacttggacaacggaaccgtggcgcacgatttcgccgacgtgatcacctccgtggccgataccgctcacgtggtcgcctccttcaaggcagataagtggaccggtttcgacggcgctcccgccatcaccgtcaacgacttcggcgacggcaaggccgcatacgtcggtgcccgtctcggccgtgagggtttggccaagagcctgcccgtgctgctggaggaactcggcatcgagacttcggctgaggacgatcgcggtgaagtgctgcgcgtcgagcgtgcggacgaaactggcgagaaccacttcgtgttcctgttcaaccgcacccacgatgttgcggtcgtggacgtggaaggcgaaccgctggtcgcctcgctggcccaggtcaacgagtccgagcacacggccgccatccagcccaacggcgtacttgtcgtcaagctgtaaaaccgcgcatagcgcctaattgcccaacggctcccttgctgctcatcgtagcaggggagtcgttttcgtatctccagcaaagtcgggtagggtggtcaccgtgcgaggcaaaaacagagtgacgatggcggacgtggcccatgaggccggtgtttcggtagcctcggtgtctaattttctgaacaaacagccatatatgagcgaggcgatggccgcgcgtattgcggaagccatcgacaggctcggatacaaagtcaactcgtcggccagaaacctgcgttccgggcgtacccggttgctcaagctggttattcccgatctgcggcaggtgtacttctccgaactcgccgaggatattctggccgaggcccggcaacatggctacggcgtcatcgtggaatccaccaccaacaatcgtgcccgcgagctggaaagcatcgcatcgatgggcacgcacagcgcggacgggctcatcttaagccctctgatgatgacggttgacgatatcgcggctttggatggcgattacccgcttgtactgttgggtgaacgtttgttcggcgtcaacgcgccgcacgtagtgattcgcaatcgcgaaggggccgccgccgcgacttatcacctgcttgatgccggttgccgccgcatcgccgtagtcggtgccgtgccccaccccgagcacgatttctcgtcgggctccatccgcacccacggatatcgtgaggcgctggccgcgcgcgacatcccctgtgatgacagtctgcttatcgaaacccaaggctgggggagcgccgacggtttggccgcggtggacaccatgctggagagtggcctgcaattcgatgccgtgttcgctttgaatgacttgctggcgtggggcgtgctgcgtgaactgcgcgaacgcggcgttgccgtgccggatgatgttcgcgtcatcggcttcgatgacgtggaggaatcggcctacatggtgccgtctctttccaccgttaaccccggcagggaagccatcgcccgactggccgtcgaatccatcatccaacaggtcgaatccggcagtcgcgctcctgcccaaaccatcgaggccccctatagcctctccctgcgcgagtcctcgccggcgttggcctgcgcctgatgaatccatggttcgaaatatccgaagtgaatgacaaggcccgtcaatcgtatggtgattgacgggccctggccgtattggacttgactgtacttggtacgggcgtgactctccgtcttttagccgtggaattccacgctgatccaggagatggcgggaagcgttgccgtgcaggtgccggtggcgttcatcgcaatgtcgagcggttgcggcgtgacggcttcgggcgcttcggcggtgttggtgcggtacggatcgtcctcatgcaacagttgcgccttgccgagcgcgagcgtgccgagaccgggcaggccgggcagcccggaaaggtcgatggtgagcgtgtgtggggtgttggcgtcgcggttgacggcaagcagcagaccggtgcgggcctgttcatcccacgtgactaccgcgtcgatggccggcacgtcgccgtatgcctcggtatggatggtgggggagctgatggccggagcgtaggcctggccgcgcgcgtgaagggcggcttcggcgaacgggtagaacgtggtctgccgccatgccgggccgtgttcctcggccatgatgggggcgatgacgttgaccagctgggcgcgcgaggcggaacgcacgcgatcgcagtgcttgagcagggtgatcatcagggaaccttcgaccaccgcgtcggccgcggtgtagatgtcttccagcaaatgtggagacttgggccatggctcgtggtgcaaaccctgcgcggcctccgccttccactggtcttcctgctcgttccacttgtccgaataccatacgccccattcgtcgaaggacagggcgatgtctttggtgccgttattggcttcgcgcgcctgatcggccgcgtccgagacggtggcgatgaacttggtcatgtcttcggaagaggccaggaagtcctgcatggaggcggcggcccgggttttatggccgcggtcgaagtagtaggcatggcaggagacgaagtcgagattctcgtaagccttggtgagcacggtcttctcccacgtgccgaaggtcggcatataggcacccgaggaaccgcaggccacgagttcgagaccggactcggcgagcttcatggcgtgggccaccttatccaccgcgccggcatattcttccgggctcatgtggcccacctgccacgggccgtccatttcgttgccgatgcaccacatcttgatatccatcggctcctcgatgccgttggccacgcgctgatccgcccaagcggtgccgggcgcgccgttgacatactcgagctcgtcgagcgcggctttcagcccccgggtgcccatgttgacggcaagcatgatttcggtgccggctttctggctccagcggtagaagtcgtcgatgcccatctcgttggtttcggtgcaatgccaggccaggtcgcggcgcatggggcgattctcgcgtggaccgatgccgtcttcccagttgtagttggatacgaaattgccgccggggtagcgcacgcaggtgacgcccagctccttgaccaggtcaagcacgtcttggcggaagccgttttcgtcggcggtgggatggctgggctcgtagatgccgccgtagacgcagcggcccagatgttctacgaatgagccgaacagacgcgggggaacgtcggctaccggagtggcgtcggcgttgagggcgatgctggcgtccggcgtggttgcgttgccggttgtggagacgttactggccgtggtgccggcggcggtcggcgccgggctgctttcctgcttgtcgggatgggtggtttcggcggaatactggctgttgtgagtggtcatgagcgggatgcatctccttcggtttgcggttagtcaccatggtgcgacgtgtcgtgtttgcgtaaacataaaacatgtggtaccgtttcttaaaacgatacaaggcttggaacaaaacgccaagtcccgtcgtttcccataacaaggaaggaaagaacgatgaagttcggcaagaagacaattgccctgattggtgctgtggccatgctctcctctgtagctgcctgcggttccacttctgccggggatggcggaagcaccggctcctctgataagaaggtcgagctgaccgtgtggtcctgggattccacactgcctcgtacggtcaagggattcgaggccaagaacccgaacattaaggtgaaggtgaccaacgccggcaccaacaaggacgagtacaacgcactgtccaacgccatcgaggcaggctccggtgctccggacatcgcccagatcgaatactacgcactgcccgaatacgtgattcgcggccacctcgagaacctttccgatctcggtgcctccgatttcaaggacttctacaccccgggcacgtggtcctcggtgaacatcaatgacggcgtctacgccctgccgatggattccggcccgatggcctggttctacaacaagggcgtcttcgacaaggccggcgtcgatccgactcaggtgcgcacgtgggacgacttctacgaggccgccaagaagattcgcgccgtggactcctacatcacctccgattccggtgacgccggcttcttcgactccatgacctggctggccggcgcgaccccgttcgagacctccaaggacggcgggaccgtgaccatcaacctgaccggtgacaagaacgtcaagaccttcaccgacttctggcagaagatgatcgacgaagatctcatcgacaccaagaccgtcggctggaccgacgattggaacaagggtctggatgacggctccatcgcatccctgctgaccggcgcttggatgccgtacaacctgctttccggcgctccgaacggtgacggcaagtggcgcatcgcccagatgccgaccgcagacggctccgagaccaactccgagaacggtggttcctcgctggccatcgtgaagtccgacgacaaggacaaggtcgccgccgcctacaagttcatggaatacgcctgccacgacgccgagggcatcaagacccgtgttgacggcggcgccttcccggccgacaacgacaccctcaagtccgacgacttcctcaacatgacctccctgaccgactccgacggcaaggcccacgagtacttcggcgggcagaagttcaacgaggagctggccaaggccgcagccaatgtgtccaccggctacaagttcctgcctttcgaggtctacgctcgcggcaagttcggcgactacgccggcgatgcctacaccggcaagaccacgctctccgatgccgtggcttcctggcagaaggacctgcaagattacgccaagcagcagggctaccaggtgaagtaacggcaatcacagcagacttcctcctgtggtttctgtagcgggaggttgcgataacaggatcgggcactcttcggagcgcccgattttcttatgccatgggagcagtggcgcgcggattgcgataccaagatggcgtgttgccgaagaatgtgtataataaaagatgttatcgcaaccatagctacaaagtggcgaaacaaagccgttttgtgactactgaaccatagagtgatggttcacgatagcatgacgacgaggagagttgccatgctgttgtggtgacaatcactgcagaccgccgaaaggcgatccaaggaaggagaacagaacgatgaagttcaccgttgctaagaaggccattgcacttaccggtgcggttgccatgctgggttccgttgccgcctgcggttccgacaccgccagtggcaagccggctcaagataaggacgttaccgaaatcaccgtgtgggcttgggagcccacgctgacccaggttgccaaggacttcaccaagaagaccggcatcaaggtcgatctcaagaacgtcggcaccaacaccaaggaatacacccagcttgataacgccatcgaggctggctccggtgctccggacgtcgctcaggttgagtactacgccatcccgcagtacgccatcaagggcaacctgctggacatcaccgacaagacctccggctactccgacttctacacccctggcccgtgggcttccgtgcagttcgccggcaaggtctacggcctgccgatggattccggcccaatggccttcttctacaacaaggaggtcttcgacaaggccggtgttgacgccgagcagatcaagacctgggatcagtactacgacgccgccaagaagattcacgctctgggcgacaactactacatcacctccgacaccggtgacgccggcttcttcgactccatgacctggctggccggtgcaaagccgttccagacctcttccgatggttccgaagtcaccgtcaacctgaccgaggacaagggcgtcaagaccttcaccgacttctggcagaagctgctggacgagggcctgctcgacaccaagaccgctggctggtctgaggactggttcaagggcatggtcgacggcaccatcgcctctctgttcactggcgcttggatgcctgccaacctggccaactccgctgctgacggcgctggcaagtggcgtgtgacccagatgccgaccgctgacggctccaccaccaactccgagaacggtggttcttcgctggctgtgctcgcctccaccaagaaggctgacgctgcttaccagttcatcgagtacgccaaccacggcgacggcgtggccacccgtgtggccggcggtgcattcccggctgacaaggcctccatggagtccgactccttcaagaacaccaccactgtgaagaacgccgatggcgaggacgttgactacttcggtggtcagaagtacaacgaggttctggctcaggctgctgagaacgtgtcctccgactaccagttcctgccctacgaggtcaaggcccgcaccatcttcggcgactaccttggcaagtcctacaccggcgaccagaagctgactgacggtatcgccgcttggcagaaggcactgcaggattacggcaaggatcagggcttcaccgtgaagtaagccttgaaccctcgctgagactgcctagctaatctcacctgatacacaaagccccgtgacgaatcccgtcacggggcttttaccgttttaagccccgcctagtacactcgtcaccatgcgagtgatcggacagcgaatcaaaagaatggcaaccatagcagtgactgccatcctttccgtatccttggcctcgtgcgggcagtccaccaccgataaccgcacggaaatcagcgtatggagctgggaaccgagcatgggcgaggtcatccgccgtttcgaaaaagccaatccggacatccgcgtgaaatggaccaacatctccggctatggcaatctcaacaccgccattcaggacggttacggcacgccggacgtggctcaaatcgaatactatgcactgttgcagtacgcggtctccggccaattgcttgatctgaccgacaaaatcggctcggattattccaacttctttaccctcggcacatggtcgtccgtgcagctcgccggccgtacctacgggctgcccatggattcgggcccgatgggcttcttctacaacgaagacgtgttccgccaagccggcgtggacgccaccaagatcaagacttgggatgactactatgaggctgccaaaaagctcaaggagattggcgtgtacatcgccgccgactcgggcgatggcagcttttacgatgccatggtctggctcgccggcggccagccgttccacacgtcggccgacggcaaaaccgtgaccatcgatttggatgaggacgccggcacccaacggttcaccgaattctggcagaaaatgatcgatgaggggcttgttgacaccacctccgccacatggtccgaccgatggaagcgccgtgtgggcaccggtaccatcgcctccgtgttctctggggcctggatgccgtcgctgctgctgtccaatgtgccgggcgcggccggtctgtggcgcgtggctcccatgcccacctatgatggccagcccaccaacgccgaaagcggcgggtcggcactgaccgtactgcaattgacccgtaagccggatgcggcctatcgtttcgtggactttgtggcgcatgacgcccaaggcattagcgcgcgtgtagacggcggtgcctttccggccgattacgccaccctgaattccgctgattttctggataaaaccacgattaccaatgaccgtggcattgaaatcccgtatttcggcgggcagaagttcaaccgggtactgtcggaggccgccgaggatgtgtcggtcggataccagtatctgccattcgaagtgtatgcgcgcagtgacttcaaatcgacggtgggccaggcatacgagtggtccggcagtttccacgcctatcagcagcgacaggaagccattgagatgggcatgaaggacgaggaaggcaacccgctcgaaccgttggagaagcccggcaagaaagtcagtctctccgacggcctggcccaatggcagaaagacctccgagaatacggcttcaatcagggctttacgattaagtagggattcggggttgggtcggaatcgaccgcgctatacgcggccgattcctgcatactacgtcacttcacattgcgcgagtagatgtgcgccatgcccttgaaaatcaaatccgggtcatacacgtcaatcagctcggtgtcattctcaaacactcgaccgaggccaccggtggtgatcaccttgaaatcctcgcctccgagctctctgcggaactgacgaatcgtgcgctccacaccgcccaagaacgtgtaatacaaaccggcctgcatgcaggtcttggtgttggtgcccagaatcgtatccggtcgcgtaatttccacttccggcagctgggccgtatctccccacagagcggccgcaccggcacggatgccggtggtgatgacgccggaatcgaccacgcccttgtcgctcacgtgcgtgaacgtggtggcggtgccgaaatcagccaccagcactgggccgccatactcgtaataggcaccggcgcagtcggccagaatatccgcacccagcgatttcggatcgtcaacgcgcacgttcataccggtcttgatgcccggtcccaccaccatcggatcaatgtcgaggaatttgacgatggacgaacggaaggagtgcatcactttcggcaccaccgaacagatgatcacatcgtccacatcggatggctgaaaaccgctcattctcaggaattcagtcagaaacagcccatactcatcagacgtatggttggctttggtggtgatgcggtaggtgccggcgatggcatcgccatccaaaaagcccagcacgatgttcgtattgccgatatcaacggcgaccagcatgataaccctccagattcaagatggatttcatgcgcaattctacagtcccatggctatgatggcctgcggtggtcgacccagcgtggcggccaaccgtagaacacaacatatacagaggaagaaccatgtctcaagacaatggtgcgcacgtcgaagacggcgcaaccacagatgcgagccttgcctcgcgcgcaaagaatccgaaaaaaagcggcccgaagtggtggctgatctcactgattgccgtcatcgtggcagtggcggtcgtcatcggcgtcacgctcgctttcggcggtaagaaagatgacaagtcggcttcgtccagcaaccaatatgccgacaccgtgaccatcggcctcaaactggcccccaccaatctggacatccgcaacaccgccggctccgcgcttgaccagatcctgatcggcaacgtatacgaaggcatcgtggcacgtgactccaagaaccaggtcgctcccgccatcgcctccagctgggagacgtccaaggacggcctgacctacaccttccacctcaataagaacatgaccttcttcaatggcgacaaacttgacgccgaggacgtggcctggtccatcaacgagctgatcgctaagggctaccacgacgccgacgcgctcgccgccgtcagcaaggtggaggccaaggacgccgacaccgcggtgatcacgctcaagacgccgaactccaacctgttgtggaccctgaccggtcgcgcagggctcgtgttcgacaaggacgccaagtatgacctgaagacgcaggccgtcggctccggcccctacaccgttgccaagttcgtggaaaacagctcgatcacgctgaaggccaatgagaagtactggggcaagaacaaggccaagacgcccaccgtggtcgtcaagtatctggccgacgacaacgccgcggtcaatgcgctgaagtccggtgacgtgcaggtgctcgccccgattaccgagaacctcgccgaaccgttcaagtccgattccgccaagtacacggtcaaagccggcaacggcaccgacaagttcgtgctcggcttcaacaacgcttccggttccaaactggctgacaagcgcattcgccaggccatccgttacgccatcaaccacaaggagctcatcgcctctcgcggcggtgcggacaaggcgctcggcggcccgatcccgtctctcgaccccggctacgaggatctgacgaatctgtacccgtatgatcagaacaaggccaagtcgctcatggctgaagccggctattccaccgacaagccgcttcaacttacgctgacctacgccaacatctacggcaccgagctcggagaccagctgcgctcccagctcaagcccatcggcatcgacctgaaggtgaatgtggtggagttctccacgtggctgcaggatgtgtacaccaaccacaccttcgatatttcgctggtggaccacaacgaaagccacgacttcgcatcgtggaccgatccgacatactatttcggttacgacaacaagaatgtgaccaagctgtacaacgagggtgttgccgccacctccgacaaggagcgtgatgccaagttcgccgcggccgccaagcttgtctccgaggatgcgccggccgactggctgttcaactaccgcatcaccaccgccacggccaagggcgttgaaggattccccttcgacctcaaccagaccgttctgcccctctacaacgtgacctacacgaagtagttcgttacagcaatgagctccctcagtgagggggctcattgttaatccaagtaaagtaggcattatgcgattcgtgttgaaacggctggcgttattcgtggtggcgttgttcggcctgtccgtggtggtttttgcagcattgcgcattctgcctggcgatgtggcctccgtgatggccggcgtcaactcgccgcctgagcgtgtgacccagctacgcgaacaactcggtctggatcggccattgattgcacaatacttcgattggatgagtgcgctggcccgtggtgacttcggcacttcaatcctgactggtcgctccgtaacctccttggtaggcgcacgtgcgtccatcacctttcccctgattattcttgccctgctcatcgccttggtcatcggcttgccgctgggctgtgcggcggtactggcccgcagcgcaacggtgcgtgcggtgtttcatgtactggctattgtcggcggtgccgtacctgcgttgtggggcggtctgctgctgattctgttgttcgggcgcggcgtaggattgcttgatgtgtttccctcgcaagggttcccgctggatggttggggcgcacccggttcggcgatatcagcgttggtattgccggctgtatcggtcggcatcatcgtgggagcatcgcttatgcgatacacgcgcgcggccttaggggatttagccagttccggctacatcgatatggcacgctcgtgtggcatgacgcgcactcaggcggtgttgcgtgtgggattgcggttggcaaccccgcagctggtgtctgttatcgggctgaccttcgcttcgatggtcactggcgtgatggtcatcgaaaacctgtttgcgttaccgggcatcggcaacggtcttgtgaccgacgtgggcaaccgcgacctgattgccgtgcaaagcgagctgttcctgctggccgcgttctttttgactgtcggcctcgtggtcgatttgttccaccgcgtgctcgacccgcgtctgaaaaccgctaccgccattacggaggtgaccgcatgagcaatgttcgtcgtgcgacgactggtggtcgacgggctgccttcgtcatcgtcctgcactctatgtggcgtcgtgccgagggcaaattcgcacttatcgtgctcgctctgtggttgctcattgccatcgtttccctgttctggaccccgcaatcgctgtgggccactgatggctaccatgtatgggccaagccgtccgccgagcactggctcggcactgacggcaccggcgcggacgtgttcagctggctgctggccggctcacataccaatcttgtgatcgtgctgctgaccgtagtggcatctatggcttgggggctgctgctcatcgcggccatggtggcacgcaatgcggcgctcgccagttcttcggtagtggtagttgatgcgttgatttccgttcccaccgtgttgattgcgttgattctggctgtgccgttgggagcgtcaatcgcggtgattgtgatcgcctgcggcttcggatatgggttgaatctggctcgtgtggctcgccccgcagcgttgctggcggcccgctcgtcgtatgtggaatcggccttggccaatggtgccagcgggtggcgtgtgctcataagccatgttatgccgaatattctgccggtattggctgtgcaactgtcattgtcggcgggcacggcggtgttggctgagtcggggcttacttatctcggtatcggtgtgccgtccggtgtgccgagctgggggcattctctggccacttcggtcaaactcatcaacgtgttcccattaaccgtggtgtggcccggcctgatcgtcacggttgtggttgtggcgctgaatatttttggtgatgtgctgcgcgatgccatcgatccggtcaccaaccccgcattacgtgaaataggaggcgaacgatgagcgtcgatgttcgcgggttgaaaatcacgattggcggcaaaccaatcgtctctgatgcggatatgaccattgccgacggtgaacgagtcggcttgatcggttcttcaggctccggaaaatctatgattgccaaggcgatgctggggttgctgcccctgaccgctgtgactaatgggtcgattgatatgggcagcacggaaattatcggagcttccgaacgtgcgcttgccgacctgcgcggccggtatgtgggtgcggtgttccagaatccggctgcctcgctgaacccggtgatgaccgtggcgcagcagatcgccttgccattgcggttgcactatgatctgaccaaggtcgaacgagccgaccgagtgaatgccttgttgagcaaggtcgggctggatctcgatatggccggcaaatacccgcacgaactgtccggcggccaacagcagcgcgtgggcatcgccacggcgctgatcacctcaccgcgattcatcatcgcggacgaacccaccaccgcactcgactccatcacgcaacgccagatcgtggacctgctgacctcgctggtggacgacgccggtgcctccatgctgttcatcacccacgatttctccgtactcgcgcgtgccaccacccgctgctacgtgctggacgccggccgcatcgtcgaatccggacccaccgccgacctgctcgccgcgccgaccacaccacaagcccagcgcctggtcgccgccgcccaaaccctcaccctccacacccccaaggaggattcgcatgagtaacagcagtgtgccgctcctctccgcccactccatcaccaaatccttcggcccgcgcaccgcacgccaccaagtcctcttcgacgtctccgccgacgtccacgccggcgaatgtctggccgtgatcggcggctccggatccggcaaatccacgctgacccgcattatgctgggcttggaatccgcggactccggcagcgtggaatacgagagccaatccattgtcggcggccgaaaatcgccgggattcgcgaccctgcgccgcgaatcgggactggtgttccaggacccgttctcatcactcgacccgcgttggcaagtcgccaaatcggtggctgaaccgctgagtctgcagcgacgtgatctgaacaacaccgatatcgacgagcgggtggtcgcggctctgaccatggcgggtcttgaaccggcggacttcctgaaccggtacccaatcgacctgtccggcggccaggcgcagcgcgtggtcatcgcccgcgccatcatcaacgagcccaaagtgatcctcgccgatgagccgatgagcgccatcgacgtggccgcgcgcattcagatcctcgacaccttcgccgccatccgcgcggcccggccgagcaccgccatcatcatggtctcccacgatctcggcgtggtacagcacatcgccgaccgcatcctcgtgctccatgacgggcgtctcgaagagacgggttccaccgctgaagtgctcggcaacccccaatccgattacacccgtcagctcatcgaggcagcctcgttatagaccttttttggctccctctctgaggggagctgtcgaacgcagtgaggctgaggggagttacgggtgccgtcgtattcccctcagtccgcttcgcggccagctcccctcagggaggggagccgaggccgccggcgacacgcgcttgtcgcgggttgtgctatggtgtgagacatgcagattatctcatgttgttgtcgctaaccgacgcccctgggcgagcggtcagtgacgcataacttgagatagagcattcgaatcgcggcaaatctgtcgcatgaattttcatgaaatcgatggcacgagcgtaaccgtgtaacgcgcgagtcgtggttaacatgaaaaaccgattcactttccggcttcaccgtacagtgagcggggatactcgatttcaaactaaagccacagtccattcgtctgggaacgtcggttcacgaacgcaacgcagcaaaaccccacaaccccagcaacgaaggacttcacatgaccatccacaacagcctcgcagaactcatcggcaacaccccgctcgtcaagctcaaccacattccgcaggcggccggcgtcaaagccaccatcgccgtcaaagtcgaatacttcaaccccggtggatcttccaaggaccgcattgccgaacgcatcatcgacgccgccgaacagtccggccaactgaagcccggcggcgtgatcgtcgaacccacctccggcaacaccggcgtcggcctggccctggtcgcccagcagcgcggctaccgcacgattttcaccctgccggacaaggtctccgaatccaagcgcgcggtgctgcgcgcctacggtgccgaagtcatcgtcacgccaaccgacgccggcccggacgacccgcgctcctactatcaggtcgccgaacgactggccaatacgattcccggcggcttccgcccgaaccagtacgacaatccgaacggcccgctgagccactactacaccaccggacctgagatctgggaggccacggaccacaaggtcacgcacttcgtggccggcatcggcaccggcggcaccatctccggcaccggcaagtacctcaaggaagcctccaacggcgcggtcaaggtcatcggctccgacccggaaggctccatctactccgcttcctcacgcgacgaagtccaccagtacgatatcgagggcgtaggggaggacttctatcccaaggccttcgaccggaacatcaccgacgacatcgtgcgcgtgtccgacgccgaagcctttgaaatgacccgccgtctggccggcgaggaggcgctgctggtcggcggctcgtccggcatggccgtggccagcgccatcaagtacgcgcttgccaatgatttggacgagaaccagatcgtggtggtgctcgcccctgattccggccgcagctacttggagaagatcttcaacgacgactggatgcgtgccaacggctacggtgacatcgtggaacgcaccagcaagccctccctcgccgagcagtaccttaacggaactccctctgatgagggagctggggacggactccataactagctatcaaaagaatcaataccaacatccgcactaaccaaccgcacctgttttaccttcgaatacggaacaatcccgaaaggaacccaatatcatgtccgctgaatacaacgccaagttcgccaacaccgacatcgccactcgcgccatccacgccggccaggagcccgacccgaccaccggtgcggtcgtcacgccgatcttcgccacctccactttcaagcaggatggcgtgttgggcctcaggggaggccacgactactcccgctccatcaaccccactcgcaccagcttcgacgagcagctcgccgccgtggaaggcggcaagtacgcgctgagcttctcctcgggcttggccgccatcgacgtgctgctgcgctccaccatcaagcccggcgacaacatcctgctcggcaacgatgtgtacggcggcacctaccgcctgctctccaaggtgttcgtgccgtggggtgtgggcctcgacgtggtgaacatcaccgatctgaaagccgtggaaaccgcattggcctccaagcactaccagtatgtgtgggtcgagaccccgtccaacccgctgctcaacatcaccgacatcgcggccaccaccgaagtcgcccacaagtacggcaccaaggtcgctgtcgacaacaccttcgcctcgcccgcccttcagcacccgctggccgatggcgccgatgtggtggtctactccaccaccaagtacatcggcggccactccgacgtggtcggcggtgccgtggtggtcaacgatgaggagacccgcgagaaggtcgccttcctgcagaacgccgccggcgcagtgccctccccgttcgactcctggctggacatccgcggcctgaagaccctggatctgcgcgtcaagcgccacagtgccaacgccctgaaggtggccgaatggctcgaatcccagccctctgatgtgattgagcgcgtctggtacccgggcctcgagtcccacccgggtcatgaaatcgccgcccgccagatgcacggcggcttcggcggcatcgtctccgtgcagctcgcggccggtgccgaggcggccaagcacttcgtggaccacacgcagatcttcacactggccgaatcgctcggcggtgtggaaagcctcatcgaggtgcccgccgccatgacccacgcctccgtggccggcaccaccctgcaggtgcccgccaatctggtgcgtatttcggtcggtatcgagaacgccgacgaccttatcgccgatctcaagcaggcgttggatcgtatctgaccgtactgacggtactggtggcaccgtattgacggtgccaccacgcttatcggcggactcgctatcgattggtacctacaaaaaaatccccggcccacaagggtcggggattttccgttatcgattaaacatggatcgaatcagctggcgttgccgccctgccatccggtggcatccgcaccagccgggcgcaacgcctgaccggaagtcggtgtggtgccatcaacgaccacacgagtgccgatggtggcaaagtcgtacatccacttggcgtcggccacctgcatgttgatgcagccgtgcgagcctgggataccctgctgcacatagatggggtgctcgccccacatgtatgcaggaacaccgtgcagggcctcgccgccgttatagtaggaaatccacggcgtgcctggctggttgtagccttcgccaaccatggtctgcgattcgtacttgagatacacgtagaacgtgccggtatcggacagcatggaaccatcggcggtgggcttgccagaagcgatgttgaacttcttgaccaccgtggtgccctgatatgcagtggcagtctggttcgtcagatcaacatgaacccacttatcgccatttgccgtatcgaagttatgaggcacctcgacctgcttgacatcatacgggctgtctttcacagccacagtggaatcagtggactggttctgctcgatggcggtagccagacgttcgggggcgtccccggcgccagtcacttcaataccatccacgccgagtgtcttatcggcaccaatttccacgccgccttcgtctttcggcgtgatgtagacctcgcgtgtcaccttgggaacagtcagttctttggttacgctgtcactggtgacgtacttggtgatggcatcgcggtcgactaccagactcatggtgccttccgccttattcaccgtgggcttgaggaatgaggcaatggtatcggccgggatggtgacgctcttgttcacgccgttgtctacggtcagtttgaggccaagcctggcattggcgtcaaactgtgtttgctgtgcgctcgcgtcatcaatcggattctttgcagtctgtagcttgaccggcaccgtcgcattttcgcccggggtcgcgacggcctccttgactgcagcattgacaacattggtatccgggcccttgccgtcctgacccgcggtgtagtcgaactgtttggtgctcttgttgtagacaacggtggcaatctgcgctcggtcggcctcatcgaccaggccggcggtgacgaattgttcggcagtctctttgtccgtggtggcggtcagagcgatatgcggctgatcgaaaatattgagcttggccacgtcgccggtcttcgcgttcaacagcgcatccacggttttatccgtgtcgacggtgacgccaaggtccttcagcgaggctttgacgctgttgccttcggcggtgaacgtcaccgtggtgttattcagccgctgcttcacagtattcgcaagttcttcgcgggtctggcccatgacagagacattgcccaaatgaacaccgggcgcagccttgtcttggaagtaccaacgtccgacgaagaaataggctattaatgcggcaagcaacactgcaaatatggttatgatggcaatccatgcggccttgccatgtgatttagcggtggtagatgccataacatgttcacccacataggctgtattatcggcatggttattggtgccattgtcactttgctgtggtgtggcggtacctgaatccgcggctgcgaacagcccatcggtggccacaggctgcagcaccgccgtctcctgatcgtcaggagaggagaaggaaaatgtatcgttggccatcaaaatgccccgtcttagttctctcaaagcggcatatcgtgcgatatgccgggaataacgttccttgacgcataataatacggaagggctacgtacatcgttgcgaggtattccgttatacgctgaaatccagccgcggtcggcctacactggtcgtttatgacagcacatcaggcggcgctggaggcgctcacacgatacttcggctatgactcgtttaggcccggacagcaaggaattgtcgaggctttgcttgccggacgcgatgtcttgggcgtgatgcccaccggcgcaggcaagtccgtgtgctaccagattcccgccgcgctcagcccgggtatgactttggtcatatctcccttgatttccctgatgcgcgaccaggtcgatgcgctgaacgacctcggtctgccggccgcgttcatcaataccactcaaactcccgacgagcaggcgatggtgttcgcccaagccgccgccgggcagatcaaactgctgtacgtggccccggaacgcttggaaaccgggcgattccgcgactttgccgcccgtacgccgatctcgctgatcgccgtggacgaagcccactgcgtctcccagtggggtcaggacttccgctcgtcgtacttaggtatcggcgatttcatcgccgggctgccgcagcgtccaccggtgggtgcgttcaccgccaccgccaccgaacgggtgcgccgggacatcgtgggactgctgggattgcggaatccggccgtcaccgttaccggattcgaccggccgaacctgtattttgatgtggtcaaactggaaaccaaatacaaggccgcatgggtggcgcggtatgtggccgaccatccggacgaatccggcatcgtctactgcgccacccgcaagaccaccgaagcgctcaccgacacgctgaaccagatggggcatccggccgttgcctaccatggcggcatgtcgccggacgcgcgtgaggcggcccagcgcgacttcatcaccgacaaggtgccggtggtcgtggccaccaacgctttcggcatgggcatcgataagtccaacgtgcgttacgtcatccaccacaatctgcccgaatccattgaggcctactatcaggaggccggccgcgcgggccgtgacggcgagcccagccgatgcacgctgctgtggaatgagtcagacatcgtcacccggcgtcggttgctggataacgattatgagaacgaacgattgactcccgaagagcaggaaatcgttcgccagtccaagcgccggctgctggacggtatggtcggctactgccgcaccaccgactgcctgcaccggtatatgacccggtatttcggtcaggaattgtcgccgaatgctggttccacggcgggtgaagacattgcggcggactcttcgcagtccggcaaatgcggtgcctgctcgaactgcgaaagcacgttcgagaccatcgacgtgacccgcgtggcgcaggcgatcagccgttgcgtgcatgacgtggggcagcgcgtcggttccggcaagatcgtcaagatcctgcgcggttcgcgggcacaggatctggcatggctgaacccggagcggatgcccaccttcggcatgctcaaggacgtgaacgaggctcgcgtgcgcgacgtgttgagccagatggccacggacgggtacctgtcaatcgccgaagggcgtatgccaatcgtcatgttcggtgcgcgggcggccgaaaccgccgctcccgacttccactatgagatcaaacgggtggaacgcaagtcggaggcggccggttccggtcggagcgggggagtggctgatactgccgattccgccaatgttcccggcgatgcgctgggctcgtatatcccggacgatgacgaggaatcgctgttccagaagctacgcgaactgcgacgcaccatcgcccaggaaatcggcaaaccgccgtacatcgtcttttccgacaagacattgcgagacatggcccgtatcaagccgattaccaatgcgcagtttttggctgtcaacggtgtgggccagcacaagctcgacctttacggcaagcgctttatggaagccgtcgcctcgtttaacgccgggagtgcgtcataacaatctcctatagcgaactgcggagtatttgcgggcgttcttgggctggctcgactacgatgactgttcgatgcttcatgaccgaacactcggcaagtagaaaggcaacagcatggcagaagaaacggccgaaaagcccgtcgtcgaatcattccagcttgatcacaccaaggtcaaggcgccgtacgtgcgttacatcgacaccgaaacgggccctcacggcgacgtgatctccaactatgatctgcgcctgacccagccgaacaagcaggccatccccaccggcggcctgcacaccatcgaacacaccatcgccgtgctgctgcgcgaacgtatcccgggctacatcgactgctcgccgttcggctgccgcaccggcttccacctgctgacctggggcacccactccaccgaggaagtggccaaggccctgaaggaatcgttggagttcatcgcgtacaaggccacgtgggatgacgtgcccgccaccaccgagaagagctgcggcaactaccgcgaccacagcctgttcaccgccaaggaatgggccaagcagatccttgaggaaggcatcagctccgacccgttcgagcgcaaggtcgtctgatcgcaagccaatcggcatggaagaaccccgcccccgcataccacgcggacggggtttctttgtgcctatgtttgtgcctatggcatggtaggtttgccgtcagttaatcgttggccgctgcacatcggtagcttggcatgttggagaggtggaagtgactcagtcgaacgctgcaaacaaggcgacaggccgccgtttccgccacgccaccatgcgcgatctgccgcagatgcagaaaatctacgcacgcgcacgcgcgttgatggccgccaacggcaaccccacccagtggggcaacgaatttccgcgtgaatcgatgattgaggacgacatcgccaaccagcgtacgatgctgctggtcgacacctgcaatggccacgaacgcattctggcccagttcgccctgtgcccgggcgaggatccgacctacgccaaaatcgacggcgcctggctggacaacgacgcctatgtgaccatccaccgcatcgccgcatccggtctggtgcgccacgcggcccgcgactgtatcaggtgggccctgaagcactacggcaacgtgcgcgccgacacccaccccaataacaaggccatgcagcacgtgctcgaaagctccggcttcgcccgttgcggcctgacccagctgctcgaccggccggtcgacaccaccagaatcgcctatcagcgccacgagtggtgagtgtggctgccggctgatgtgctcgtttctgcaccgtcatcggtttctgacggtagaatcagtgtgtgagaagaacacgttgggtcgggggcgtcgtgacggtgcttgcggctgtcatgctgtcgtcgtgcggcggcgtccagtcgaatcccgggtaacacaccgttgccaatccattcaccgcgcaggtgaatggagaagacatggcgatgcctgtcggccgatggagccccatcggccgacaggcatcgaggaagtcaccgtggccggcggaacgcgcggtcgccgattggggcgaatggcttgtgtggttcgctttggtaccagtaggcgaccgtggccacgtcgtcctgtcgttcgaagttgccggcttcctcggtgccgatctgctgccactcgacgcgcaggtctcgctcgaagtagatcgggtcggggatgtgccaacggtataggccgcgggtcacgggggtggcagtgtcccagtaggcgctttcgcgtccggcgaggttctgcgagtagaacgggaagccgaggtatgggccggtgaaggtgcgctcgtgcatgcggccgtgttcgtcgaattcggcgaagctccaggcgccgccgaagtagtcctcggcgccggtgctgcaccaggtggggtatttgccgtcgccgtcgatgtagaacttgaattcgccttcgccccaccagcggctttcgagcgcggtgagcgccaggtaggtgccgacgtaggtgccgtgtccttcgacgccatcgagcaccacgtagtcgtgggcgagttcggtgacgcgttggcggcgccactgcgcgtggaagcgcatcgtgtcggccggcagctggtcgtattcggtgtagtcgatttggtagaagaacgcgggcacgtcctcgttgtggtcgttgcgcagcacgatgcgcgcgtgttcgaacggcatggcgaagtagcagttgaagccccggttcgggttgaccatgacgggaattgagttgatggtgcaggactgggcgtgtccgcagcagaagaagtcgccgatcgggcattgcaccgagggggagtcctcgccgtcccagtagaattccaggatcaggttgcgtagcacgtcggggccggtgggggaggtgcggtcggttaccgtcatccagatgtgacggatcacgccggggccctcgacgtccatcaaagtcaccgattccccggacctcaccgtgctgatgcaggggcttcccttgcgggaggggcccaacgcgctggccgccatggccgcgcggcccttgccgccgtccgggttttcggcgttgatgcagcgggtgcggccgggtgccctcatggccacggcatccaaggcgctttgtccgagccccggcgcggggttcgctgtggtgaatgcgtcgagcatgatgcttacttcctttcctgtcgcaggcccggcccgccacggcgttttgtctggggcgggctgggctgctggggggggtgttatttcacggcaccggcggtgatgccttgggagagcttgcgctggggtagtgtcctatatcttgcgcactttggtcttcgcccgtccctgtggcgatgatcggttcgcttcccctacggtctcaccgagtcttgacatgtcgaggtagcggcgcgtcgaccactcgttcgacgtgatataacgcacgcgtgcgcgacgagcatcaacgcgctgcgtccgtcggggaagctgccgaccacgcgcgtgcgccgtctgatctcgcggttgcgggggtgaccctggcgaggacgttgcgttcgaagtgcaccatgcacctctggtagcgggcatcgcgttcaaggtctccttgacgctcttgcggaccatacggtccagggtggtctccggcatggcctcatatcgcaaaaaccgtacgctgaaagtaactcagcgtacggttttcacgaaagcagccatcggctatcggtcagccgatagacctcagtcctcagtcgcagcgaccttggcgtcagccccggccttctgctcaaggccgagcttggagcgcttgcggctgtagccgaagtacacgatcaggcccagaccgaaccagacggcgaaacgcacccaggtctcccagttgagaccggcgatgagcacgaagcagaatacgatggccagaatcggggtgaccggcacgcccggcgcgcggaagccgcggggcgcattcggctgggtcttgcgcatccatagaataccggccgacacgatgatgaacgcggacagcgtaccgatgttcaccagctcgaacagcacgttgatgttgatgaagccgccggcgaacgcggtcagcagaccgaagaaccaggtgcccttgaacggggtacggtacttctcgtgcacgtggccgaagaacttcgggaacaggccgtcacggctcatggcgtagcagatacgggattggccgtacagctgcacgagcatcaccgtggtcatgccgatgagggcgcccaggttcacgatcaccgcgagccagttcatgccggtctccagaatcacgccggccaccggggcgtcgatgtacttggcgaactccttgtagggcaccacgccggtcatgatcagggtcatgatgacgtagagcacggtggaaacggccagggacagcagaatgccgcgcggcagcgtcttgttcgggttgatggtctcctcagcggaagaggacacggcatcgaagccgatgaagctgaagaacacgatggaagcggccggcacgatgccgtacggctgggtggagccgggctggaaagtgtagatgccgtacggggagaacggctgccagttggacggcttgacataccacacggcgcacacgatgaacagcacgatgatggcgagcttgatgagcaccatcacgtcattggtgcgcttggtctggttgatgccgatggagagcacccacgtgatgatgagcacgatgacgaaaccgggcaggttgaagtaggtggtgacgtccgggttggtgccgtaggcggcggtcagctcgaccggcaggtgcaggccgaagccttccagcagtttgttgaagtagcccgaccagccggcggacactgtggccgcctgcagggcgtactccagaatcagatcccagccgatcacgaaggcgatgagctcgccgaacgccagataggcataggagtaggccgagccggacaccggggccatggcggcgaactcggcgtagcacagaccggcaaaaccgcagcagacggcggccagcaggaacgatacggacagggccgggccggcggtcagcgcgcccttgccggtgagcacgaagataccggtgccgatgatcgcgccgatgccgagcatcgtcagatcgaaggtgcgcatcgtgcgcttgaggggagtggattcggcgacaagctgatccacgcttttcttacgaaacagatccatgttcttctctcatgaaatctaggattatggggctgaaccggacggatttccgggatcccggcacgcctcaacgccgggaatcaaaggcggcttccgagaaaccgcatatcggtcattagtgtacgactgccgggcgaaaacagacgattgcgactacacgtcacattctcgcgcaacaataggtgcctatgagcatgaacgcagcacctgaaatcgcattctcgtccgagcagggcaaggccaactatgtggccgcccgccgccaataccccgcacaggccatcgtggacctcaaaaccatgcgcgacaacatggcccacctggtctccgtggtcggcggtcccgcttccggcacggcggtgatgggtgtggtcaaggccgacgcctacggccacggactgctgcccgccgccctggccgcgctcgccggcggcgccacatggctcggcaccgcgcagtcgcacgaagcgttgctgctgcgcaagctcggcatcggccccgaccgctgccatattttgacttgggtatacaacggcaccgaagtcccgttcgacgagctgatcgccgccgacatcgacgtatcggtcggctccctgcccggcatcgacgcggtggccgccgccgcacgcaagctcggcaagcccgcccgcgtacacgtcaaggtcgattccggctttggtcgcaacggtttcacaccggccggattcgacgccgcgctcgccaaactcgtgccgctcgccaaagagggcgtgttgcatattgtgggtcagtggagccatctcgccgtggccgattcgcccgatgtgtccgaattcgtgtcctccaccgaccgccagatcgaaacattcaaggacttcacgcgccgcatggaacaggccggcattccgccggagatccgtcacctggccaacacagcggccactttggaccgcccggagattcacttcgaactcacccgccccggcatcggcctgtacggctacgagcccgatcccgcgatgggcaccccgcgcgactggcatctgaccccggccatgcgcctgcaggcgcagctcggcacggtcaaggatgtggaggccggccacggcatctcctacggccgcacctacctgaccccggacaacacctcgaccgctattgtgccgctgggctacgccgatggcatccaccgctccgcttccggtttcgatatggaaggtgccaagcacgtggagaagccgggcggcccggtgcgcatcatgaccaccgaaggcccgaagatctaccgcgtgtgcggccgcgtgtgcatggaccagttcatcgtggacctgcacggatccgccgccgaactcggcgttcacgagggcgacacggtcgaactgttcggcccgggccgcggcgaggattacgttgagcctaccgccgacgattgggcccgcgccgccgacaccatcagctacgagatcttcacctgcctgcgcaaccgcatcccgcgtctttacgagcatgccgccgaagtgctgcccgccgccgacctcgccaaactcgaccccgccacgctgctataaggtgcattaccgccatacggtggcaccccgtgatcccttcttccgaatatgtgccactgacatgtgctgagcgtcacatattcgggaaatcggccccaatctcccgaatatgtgccgttgagttgacgtcagtggcacatattcgggaagtcgggattactgcggccgatatgtgtgcctatgcttggcatatggaaacgactttggatggggaacaggtgctgagcgacgagggctacagcgccttcgacgaggagcgatgggcacccgaggcgcccaaatccaagtcacgcaccgcgttcgagcgcgatcgcgcgcgactgattcattcgtccgctttgcggcgtttgggcgcgaaaagccagattctgattgccggtaccgacgatttcgctcgcactcgactgacgcatacgctggaagtcgcccagatcggtcgccaaatcggcgcattgctcggctgtgatccggacgtggtcgactgcgcctgtctggcccacgaccttggccacccgccgttcgggcacaatggggagcgtgcgctcgccgacatcgccagcaatatcggcggcttcgaaggcaacgcacagaccatgcgtatcctgacccggctcgaacccaagatctttcacccggacgggcgttcggccggcgtgaacctgacccgtgcggccttggacgcggccgtcaaatacccgtggaccttggccgaagccgaccaacacccaaagggggagcggtcgaagaaattctgcgtctacccggatgacgagccggtattccgatggctcaagatcggcgcgcctcaggccaccaagcccatggaatgccagatcatggacctttcggatgatatcgcctactccgtgcatgacgtcgaggattccatcgccaccggcgcgttcgatccgattgtgctcgccgatccgaagatgctggaccacatcatcgagcagacgcgcgcatggtatggggcgaagtgggatgccgacaagctgctggccgcgttcatgcgattgcgccgagagtatttgttccctgcacatttcaatggttcgcgcgaatcgttggcacagcttaagaacattacgtccgatttgatcggccgcttctgctggtcggtggaaaccgccacgcgcgacacgtacgggcccgggccgttgacccggtattccgcgaacatcgtgattcccgagaacacgaattacgagatcgtggcgctgaagggcatcgccgtgtacttcgtcatggcgcctcgcgagcgcgagccattccatcaggaggagctcaagatcgtatcggatttggtcgatgtgcttatggctgattcgccgctcccatccgacgctttggaaagccagttcctggccgattggaacgaatccaccaacgacgacgaacgcctgcgcgtcgccatcgatcaggtcgcgagcttgaccgacaactccgccctggccctgcactccatcttgtgctgagggcgtgttgggcgggcgcttccctcagtctcgctgcgcgagccagctcccctcgggtgaggggagctgtcgctgtaggcgactgaagggagtttcgcggaagaaatgataaccgacggtaaaaatttaccgtgtctcaggtgaggcggtactctagagacttatggtcggaatgattaagaaagaagatgtcgagaaggtgcgcgccgccgcggacctgtatgacattgtatctgcgaccgtaacgcttaagccctccggcaccggcaccttcgtgggcttgtgcccgttccacgacgagaaaaccggcagcttcaacgtgcgtccctcgctcggcgtgtggcactgcttcggctgcggcctgggtggcgacgtattcaaatacgtcgaacaatccgaaaacatcgacttccgcgaagccgtggaactgctcgccgacaagtaccatatcgagctgcactacgagaacagcggcaatggcccggcgcgcgagaacaccggctccaagcgcacgcgactgctggaagcctgcgaggaagcccagcgcttcttcgtctcccagatcttgaccaaggaagcactgcccgcccgcaagctgcttggcggccgcaacttctcccaagctgattgcgaacgtttcggctgcggctacgcgccgcaaggctgggataatctcgtgcgccacttggcctccaagggatttacgcagaaggaaatcctcgacgcgggcttggcccgtcaaggccagcgcggcatctatgactatttccgcggccgagtgacctggcccatccgcgattcgaccggccgcacgctcggcttcggcgcgcgcaagctgtatgaggacgaccagatcgccgccaaatacatcaacacgccggatacgcagctctaccgcaaaacccaggtgctttacggcatcgatttggccaaatccgccatcgtcaagaagcggcaggtggtgatcgtcgaaggctatacggacgtgatggccatgcacttggccggcatcgacaccgccatcgccacgtgcggcacggcgttcggcgccgagcacgccaagattgtgcgccgcctgatcgccgacgattcgctgggtgcggtccagctggtcgggccgttgaaggtcaaggaccagccgttgagctcgcgcatcgtgttcacgttcgacggtgacgccgccggccagaaagccgcgctgcacgctttcggcctcgattcggccttcctctcccaaaccttcgtggccgtggccgacgacaatctcgacccgtgcgacctgcgcatcgagcgaggcaacgaagcagtgcgttcgctgatcgcccgcgccaaaccgttgtatgacttcgtgatcgacgccgccatcagccggttcgacctgacctacacgcccggccaggtcggtgcgatgaaagccgtggccccgctggtggcgcagattcgcgaccgctccctatgggacgcttacgcgcgcaaatccgcaggccgtatcggcgtggaccttgaggtaatgcgccgcgaggtgatgaacgcgcgccggcagatgcacgtgcgcgatgaggacgcctacgcgcccaaacgtcgattcgagcgtgacgagccgcgtgtggaacccggcaccaacccatacgccaatccggccacgcgcaaggcgttggagcgccgtgacgccgccgaacaggcgtacttcaagatcgacgacgccgtattcatcgccgagcagcagttcatggccgtgctgattcaggtgccgcgcgccatcgaccgcaccatgttcgggcagctgaccatcgaccatttcatgactccggtgttccgcactttgttccaagcgattgcggcagctggcggactgccatccgacgataccccgcagggtctgtggatgcataacctcactaaggcaggcggaccgatgctcaatcaggtgatcaacgagctggctgtcatgcctctgcctctgcctggcgacgacagtggcaacggcgcacagccggtgcaggccaacgtgtcgggaggaggtgttggcgtgaatggcggtgccgccgcagtgcagctgcgtcctgccacgccggaggagcagcgctacgccactgagcttctcacccgattgttggacatgggcttcatgcgccagattggtttggccaaacgccgcatggcccaactgcccgacggcgaagagaagataaccctcctcggccaaatcacccgtatggagactgctcgcaaagatctccaagcccaaatctatggcaacaccgttggctagtaatctctccctctgacgagggaggttactggccgcagtcgggcggggcgagagaagcgacgtcagatatatcgcgcagcatcgatgtcacatcaactattcgtttgatattaactttcccgttgtctaaatgaaagtgcaacacccgttagattggaaattgcctagaaaaccagtccgaagggatgtcgcacctatgggagaagtatattcgcacctgtcggaagaggaacgccaggtcatccagatcgaggtaggcaacggcgccagcatacgcgggatcggcgcgatgctgggccgcagcccgtccagcatcagccgggagatcaagcgcaacacatggttcccgtccaacgagaacgagtcgtaccgcccgtaccggccgaaaagactgaaggcggggccatggaccggccgctactacatcgccgggcccgcgcagcgcaaggccgaccgcaggagatccaagccacgaaagccctaccggctgtcgcacgaccgcctgtgggcgcaggtggccgaatggctgggccgcggctggtcgccgctgctcatcagcggcaggctgcgcgtcctgtggccggacgatgcgctcatgcgcgtgtgcccggagaccatctaccgatgggtctactccagcaggccgcttcgggaacgctgggcgcggtgcctgccgcgagggcacaggcggcgccgcaggcacggcggcaggaggacgtcgcgcttcccgatccccggccgagtgcccatctccgaacgcccgccggaggccgacggcaggagcgcgttcggccattgggaggccgacagcgtcatcggagtgggatgcaacctgcacaccgaggtggagagaaggaccaggttcctcatggcccgcatcgttccggacaagaccgccggcgagagcgtcggggcgcagctggacatgttctcgccgctgccggccggcgcgcgcgtcagcgtcacgcacgacaacggcaccgagttcgcccaccacgaaaggctgcgcgacgggctgggcatggccacgtacttcgccgacccgtactccagctggcagcggggaagcaacgagaaccgcaacggcatgatccgccggtatctgcccaaacgctgcgagatccggatggacatggcaaaggaggtcagggagatcgtcgacgagatcaacaaccgccccatgcgcgtgctcggctaccgcacgcccgccgaggcgttcgccgacgaactgttagaattacaggaccaacaagggtgttgcacttctaaatagacatcgggtttttaatgacaaacgataaattatggtataatgcaagtatgagttgcttggtttgcgcaatgaagcggaggctcaatcatggcaacgacaaagaaactatccttcggtttggataaggccggtggcgcggccttgatcctggcccgcatcggtgccgcgctcctatggatcatcgcagcgctcgcggccgtggtgtgggtggtattcctcatttccccgcgctcgttcgccgcgaacttcggcagtgtcgacctgaatgtcggcggcgcgttcaccctcagcatcaagggcgacttgttggactactcctataatctgcagaacttccacgacggtcccgtcaacatggtagctaccatctccaccggtctggcgagaatggtggtctacgctctactggccttggcgttctccgaaatggccgcactgtgcaaggatttgacggtgtggcttgcagacggcagggatgccacgcctttccaaggcatggtgtccgaccggttgaacagggctggctggtatctgattgtcgcgccgattgtgggtctggtgaacttcatcgtatgtttcctggctggcacgggcggcaactggggcttatggatgagcggcatgatggtgatgattggcattatcctgttgctgattgcgcgcatcttcgattatggcatgggtctgcaacgggaagtcgacggtctgctgtgagggggaagagcgccgtaggcccgcgtggcgccggtccgaacagggccggtccgaacaccgagggcccgaatgaggacagcctgaacatcgttgattcgagcgagaccggcctgaatacggctgactcaaactccaccggtccggccggcataggccatatcgtcctgcgcctcgaccgcatcatggtcgagcgaggccgctcactcaactggctggccgatcaggtgggcatcaccaacgtgaacctttccaaaatcaaaaacaatcgcgtttccgccatccgcttttccgccctcgccgccatctgtgcggcattggattgccagcccggcgacattcttgaatatgtggatggcatttcgggcgatgcggacgatgcgaatagcaagtaatcgcacgcatgccaactcttctcctcctggcctgtgattgattgacaatcagggattacatgccaaatgggagagataaacatgtggaggttggattggatgggtgcagaagttgcgaattggccccatccaaattggactggtttgggtggggccaatccactccgttcaataatgaagcgcgataccaagcagcgtcgaacgaagggaaactcatgacgcagaatcgtgcggaactcaaccgtaatttggcccagatgctcaagggcggcgtgatcatggacgtcaccacgcccgagcaggcgaagatcgctcaggacgctggtgcctgcgcggtgatggcgctcgagcgcatccccgccgacatccgtgccgccggcggcgtttcccgcatgagcgacccggccatgatcaagggcatccaggaagccgtgtccattccggttatggccaaggtgcgtatcggacacatcgccgaggcccgcattctgcaggccatcgaaatcgattacatcgacgaatccgaggtgctttccccggccgacgacgtgtaccacatcgacaagaaccagttcgatgtgccgtttgtgtgcggtgcgaagaacctgggcgaggcgctgcgccgcatcgccgagggtgcagccatgattcgcaccaagggcgagcccggcaccggcgacgtgattcaggccgtgcgccacatgcgcaccatgaacaagcagatccgcgaacttgtcggcctgcgcgacgacgaggtctacgaggccgccaagcagctggccgtgccctacgatctggccaagtacgtgcacgacaacggccgtctgcccgtcgtgaacttcgccgccggtggtgtggccaccccggccgacgccgccctgatgatggaactcggtgccgaaggcgtgttcgtgggctccggtatcttcaagtccggcgatccggccaagcgcgccgccgccatcgtcaaggccaccgccaactggcaggacgccgatctgctcgccaagctgtccgaaaacctaggcgaagccatggtcggtatcaacgaggacgagattcagaccatcatggccgctcgcggagagtgacgggagtcgaagccggagaggacaacatggttgtagctgttgaatacatttccaaagaagaatccgcagacgccgaaaccgccacgcacggcgtgaccggtattctggccgtgcagggcgcgttcgccgaacatgcggcggtgctcgacaaactcggcgccccgtggaagctgttgcgcgcggccgaggatttcgatgaatccatcgaccgggtcatcctgcctggcggtgaatccaccacgcaaggcaaactcctgcgttccaccggcctgttcgagccgatcgccgcccacatcaaggccggcaaaccggtgcttggcacctgcgctggcatgattctgctggccaagaagctcgacaatgatgagaacgtctacttcggcgcgctcgacgctgtagtgcgccgcaatgcttacggtcgtcagctcggcagcttccaagccatcgctgatttcggccaagccgacgacccacagcgcatcgcggactttccgctggtgttcatccgtggaccctacgtggtgtcggtcggccccgaggctacggtcgaaaccgaagtcgatggtcacgtggtgggcctgcgccaaggcaacatcctcgccaccgccttccatcccgaactcacggacgacgtccgcatccacgagctcttcctgtcgctgtagccgattcgtctgccgttagactggtattcgaccgacgaatcaaggagacgatctgccatgcagttcacgctgaaccggcgcagcacggtgccgatgtaccggcagctggctgctgagctgcgtgaacagattgtctccggcgcaatggctgagggctatcgtctgccgcctgaacgcgagttggcctcacgcctcgaggtcaatcgcaccacggtattacaggcctatcagcaactcaaagatgagggactcatcgcctccaaagtaggcaaaggcacgttcgtgctgccgttgcagcatattgagactgcccggattcctgtagtgagacatgagccgattgacgaggagccgaaaccgagcgttgtgcggccgccgtggtcggtgttgttctccgactattccaaccgattcacctaccacgacattgcctcggccgagcgggcgcaacgcggcgataccatcatcgactttgccaccggctcgcctaatccggcggatattcccgacgatttgttgcgttcagtgagcattgaagcgtttgagtcgcgcgaattcgacggtcagccagaatcgcctatcgaaggattcgatgaactccgcgcattacttgccgagcatatgagcacacgcggcgtgcagtgcgatgtacgaaacgtgatggtgctttccggttccgagcaaggcatcgatcttatcgtgcgtgcattcgtcaatcctggcgactgcgtgctggtcgaacaatccacgttcttcccggcattgcagaccttccgctcggcggatgcgcgcatcatcggcgttccagtggacgagcacggtatgcgtacagacctgttggacggctattgcgcgcgattccggcccaagctcatctacaccgtcccgacgttccaaaaccccaccggtaccacgctgccgcccgaacgacgcagcgaactcatcgacgtggcgcggcgctatcagtgtctgatcgtggaagacgatgcttacggcgatttgtggtacggcggggaatcgtccgacgcacatcgccccataccgcttaagggcatggagaatgcgggatacgtgatgtatttgtcgacgttctcgaaaaccgtcacttcgggcctgcgcacgggatgggttgtggccgacccgcatgtgattaaccggctggcggctctgcggcgcatggtcgaccagcatacgagcacgtcatcgcagcgcatctgcctggaactgcttaaagaaggccgcgtcgccgaacatttgcgcggtttgattaaggcttaccgcattcgacgagatgcagcaatcgcagcattggagcggtatgcgccggatgaagtgtattggaccgtgcctgcaggcggctactatatttgggtttccttaccggacggcgtgcgctctctggatgtattggaatcctgccgttcccaaggcgtcacgttcatgccgggcagcgtgttcgacgttgacgaaatggatgattcccacatccgtctcaactttgtgcgcccggatgctgctgacattgataccggcattcgaatcattggcgagacgatagcacagatgtagccaagtgactggctcattgcggttgtcgagtttttttgatggctgcatacccacatcgatgggtgcattcgacgaatgaataagcgaggaagccatcatcagttcgctgtggcatgcgcatagcgttgtcgggcgaacggggcagaccacgtggtcgttgcgtgacctggccgatcgagccggcatcgcattgcccctggcgtagtggcgaggtggcgcagtaacgagtcacgccatcgcgagccgatgatgcgaaatgcggaaccggtcgcggccatcaacggctatcatacatgcggaagcaacgatacgttggcgtcagcacatccatctgactccagaaagggacacgatatgaccacatcctccgtttcgccggtgaccactgaactggcgggcagcgaaaccggcatcacgcttgtcattcacgccggagcgggcagtcgtggcaagcacagcacgcctgaacgcatcgcccaggtcgaacttgatctgcagcgcgccctcgatgccggataccagttgttggaatccggagcaccggcgcatgaggctgtggtcgccgccatccacgtcatggaagacgctcccgaattcaacgccggccgtggtgccgccctgaccagcgatggcatcgcccagatggacgcctgcctgatgaccggcgatggcgaggtcggtgcggtcaccggcgtaagcaccgtgaagaacccgatcgatgcggcgcgtgccgtcaaagagcagaccaagcatgtgctgttcgcggacccgaccgatgccgagatcgccgattggggcgtcgcgaccgaaagcaacgagtacttcatcaccgaacagcgtcgtcagtccttggccgaggctcagtccggtggcgatgagtgggagaagcatggcaccatcggtgccgtggcgcgcgatgccgagggcaatatcgccgctggcacgtccactggcggcatcaccaaccagatgcacggtcgtgtgggtgattcgccgctgcctggttgcggcacgttcgccaaccagtccacggtggcggtgtcctgcaccggcatcggcgaggcgttcatcaaggtggtcgccgcccatcaggtgtcggatcgtgtgcgtttctccggcgagaacgtcgaggatgccgcgacggccactttggacgaagtcgccgcgcatcatggcgatggcggcatgatcgttctgccggcggtcggccgtggcgtggtcgcctacaacagcgagatgatgaacttcggataccgtagcgcgcaaggaggtaaggtgcagggctgattgccccctgtattgcggcatatatcataatggccggtgtgctgcggattcttggtaaggaatccgcagcacaccggccattcatgtatgcggcaagtgccgccgatcagtgcggcagtgcgcgctacttggtgatcgtgttgtacgtgggcatgttcgtgtaatcgaactgcacgttcttcacgttctgtgcagacacggcggcgaaacgtttgaccgggaatactggggtaatacgcaacttcatcgctcctcttcctcgaatgaaactatgttccattggtatgagccagccacgtacggtattcgtgtctggcctgccacacaatgatgcagccgtatatacgggcacagcattgcgcggcagttcattgtatggaagacatgcaaactcaatgtttccttgtccaaataaaaaaacgagcgcggctgatgtgcggcaccggtccaaaaactcatgtccgccagcgcaacgcgactacgtaccttatgctggtctgcgcgtaaaatagaatggttgcgatattgggttattcacggaggaatggatgcgacgctggctgatcaatgtagccaaaaatgagacgattctcatcgtcgccgcaatactcgccctgatttcgtgtttcattgtgccgccggacgccgattacaaaagctacattcacgccagcaccatcagccagctcatctgcctgatgattgtggtgtgcggattccagcgtatcggcgtgttccgcatcatcggttcgcgattgctggagaaggtcagcaccatgcgcggactggtcattacgcttgtcgctttgacgttcttttccgcgatgttcatcaccaatgacgttgcgctggtcacgtttgtgccgttcgcggtggccgtgctcatcatggctgggcaagaggataagaccatcctcgtggtcacgctgatgaccattggcgcgaacgtgggcagtatgctcaccccgatcggcaacgcgcacaacctgtatctcaaagccctgaccggcatgccgaccatggaattcctcggcatcatggcaccgtattccggcacggcggccgtgttgctggtcatcgtgatttccgtggtgtttggcggcaaaccggtcggcgacctgggcgacctcgaaaccggcgtgctggctcccgagcgcaacaaacaccagcccgacgagattcgtatcaccggctacggcgccggttatggcggctggcgcaccatcgtctactcgctgctgttcatcgtctgcctactggccgtctccgacgtgattcccctgtgggtgatgtgcgtgatcgtggtcgttgtgttcctgttcaccgatcggcgcgtattcaaatacgtggattggggactgccgctcaccttctgcatgttcttcatcttcatcggcaacatgaagcgcgtgcccgaattctacgaactggcgcgctcgctggtcggcggccatccgctggaggtggcggtcggctccagccaggtcatcagcaatgtgcccaccacgattctgctttccggcttctgcgaccaatggcgcgatctgatcattggcaccaatttgggcggcatgggtacgctcatcgcctcgatggcctcgcttatttcttacaagaacgtcgtgcgccaatacccgcacaagaaaggccggtatctggccgtctactccgccgtcaacgttctgtttttggccgtattgctgaccttgagctggatcatcgagccgagtctctgagccgccgttgtgggttgggccggtctaccgcgcgtatacggtgggggagccggtcagtcggctcatggccgactgcgggatgtcgtggatgcggccgatggtggcatccagcgtggatacgccggatacgccgtctgtgttggctgtgttggctgcagaggtgatgctggatacgccgactgcggacgatgatacggccgcaaccatcggctgacgataggcgttggagttgcgggccagccgggcgagcgcaggacgctgcctgcggaacagattgataaacataccgcacactccttcatcgttggccggcggtcttctggccgccgtggattccatcctgccctcctgcgcttgtattcgctatgggggatagcccctattattccctgaatctgcacgattccccctcatccttgagggtgattctaacggcaaaggcatcggcctaatggccgatgccaatcagcgcgaaaccaccagcgtgacgctgtacggcttgatcttcatcgccagcaatgaagacggcgacggcaatgtgtaagcccgacgttccggcacaatcgcccccgaagcctcgccgcggtatccgatagtggtcttcgccgtcggattggcgcttaacgtcgtcacctccaaacgcaccggtcgcgatggcgaggcgcccagcccggccagtccgcgcgcgatttccaacgtcacatccaccggggaatcggagatattgacgattttgatgtaacggcaggcgtcatccctgtcatgcccggtggcgctgacatacagatgtttggcggggcgtgacgcggtctgctcgatggacacggcatacgtcgtgtcgcccagatgcgtggaaaacagccgctccacctcataattcaccgtggggttcacatgcgccggattgaattcgataagattctgcgcccaccccttagccggaatatgcgcgagcagcggcgcataggaggtcatgcgcaccacgtcggaattgcgctcgcagccggtcaggaacgcggcctcgccgagtgccgacttccacgtgttcgcgccttgttcggtctgtggttggccggcaaaatagccgttggctgaatattcgccgaaatagacgccggcgccacaacgcgggtaagcgtcgaatcgtgacgcctgggatgcaaaccattcgggggagtggtaggaatgctcgtcgacgataatcgcgtcaccggtggcggaatcatgtgccccggaatcggttgcggccaacgctcgcgcatggtcccagctgcgcttcatcgccggctggaaggggaacagtccggcgctcatcacacacagcatatccgggtatcgttcatgaatggcctcgctgatcatgtcaaacttggccacgtagtcagccccgaagttttcgttgcccacgccgatcatgtccaagccgaacggctcaggatggcccatatcacgccggaccgcggcccacgagctggactccggatcgccattcgcgaattcgatgaggtccaggtagtcctgaatcacattgttgcggaaggtggccgaattgatatccatgtggcgcggatctcggccgggcgactggcatgcgatgccggcgaacagagtaggcagcggcttggccttgaggtcctcgcacaggcagaaatattcgtagaaaccgatctgatagctctgcgaatagctggaaccatccggcatcttgaacgaccacatcgaatactgttggcgtcgcgcggccagagagccgacggtatccttccagcgatactcattgccgggcgtcacaccttcgacgatgcagccgccggggaatcgcagaaacgctggatgcaacgcctgaatggtctccaccaaatcgcggcgcagcttgccgtaacgccatttcgggtcgcccgcgccccaatagtccgcatccatgaactgcaccagatccagatcgaacgtggtgcgttcgccggcgtcaatggtgatacgcagcttgccgtaatcggtgttcagtccggttacgtcggcgttgaaccggtaccagccgtcacggccgatgacgatggcaccatccgacgaatccggactgatcgaaacgccggaatcctgcgcatcggccccatcgtcctgcctcagaccggtctcttccgtatcgtcaagcggatcggagtccacgatatacgacaatcgagtgatactggtgagcggcaggccgtacctatcgaccacgccgacggacagctcggcccgcccatgaaccggacgtaccgcgagactgacggaataggtgtggtcggcgacgatggagaacgcgggctcgcccccgttgtcgccgcctccgttatagccgaggttttccagatatgcagggccggtttcggaaggaacatcggacgtgatgcgagcgtatcggctatgtgcgtgaattggcggggcggggcagtcggtggtcacccgctggccgtgaatcccgcgtatctcactgccaaggctggcggcggaacagttgatgaaatcccagaaacgcagggaatcagcctgcgtacgccaccgttcggcaccggccatacgccacgtgtgatggtcgagataaacgccgtcaaaactgtagttgttcaccatgttggcgttcagcccgccatccgcaccatggttgatgtcctcgaagaacacgccgtacagtcgcccgcttgtgtgatgggtggggcttcccacgctaatccgcaccatggttttgattgtagagggaatggagcggaaaggtaaacggaagagttcgctcaccgttcatgttgcggtcaatccaagtcgactgttcgccggtatacagccggtaccctcgaaacaggaatggaaaatacggacgactaggagcgcggctgtgcaatcctcggtgggaatacgtgagcgcatcgaccacgtgtatccgtcgctgcgtccggcggagcgcgccgtggcccagtatattcgggatcatatcgaggaggcggccgacctgaccgtcggccagatggccgacatcgcccacgtcagccagccgacggtgattcgtttcgcccgcaagctcggtttcggcggttaccgtgaactgcggtacgtgttgcgccatccggccgccgagcacaaagtgaccttcaatccgttggctggattcgatctgaatccgtgggatggcgaagatgagattcccggcaaagcggcctatggcgcgaaggcgctgatcgatgagctgcacagtgcgttggaccccaaggcctatcgcaaggcggtcgccctactcgccgaatcggagttcatcgatattttcggcgtggagaactcgttgacaccggcgatggatctgttcaccaagctcggctacctgggactgacatgccgtctcaataccgacgcttacctgcagcagatcggtgccgggcacctgccccacggcgctgtggccgtcgccttctcccattcgggtagttcggcggatacggtcaaagcgttgcgattggcgaaatcgcatggcgcgaaaaccatcgccataaccaatgccatcggcgcgccgctggccagctgggccgacgtgacgttgctgacgggtcgtgactcgcacacgatctatggcaatgcgattttctcgcgcgtggccgataccgcgctcgtggacatgctgtacatgggcgtgattctgtccgactacggccgtttctccaccgcgctcgacgaatccggtcgcatgattcgcgatcgcgtattcgagaactgagctgctgctttatcgtgccttgggctgtattgctctggtcgttgctgcttgggttgttgacgatttggtcgttgtcgccctggtcgctaccgtcctgaggcatgtgccagcgaatacgtagtggacttggcgtgcgtatgacgttcgatcttgccgctcaactccagctggtccaagagctgcgtcatctgatccttgttcaggccaagcgctttctgcatggttttacggctgagcttcacaccgcggaacgcgaggaaattgagcgtgaactgttccaacgtttgaggcgacggttccagcgtcgctgtatcgagcgggcgggtactggcctgatcgtcaccgtccgggcgttcgccgaatccactgccgagaatcagcgtctgcagtggcgcgcagccgatgatgcgtgcgccggccaaagcatctgcggcgttatccgtcatgcgctgaatcgtggggaatgagtacattttggcatgctgtgcttcgtcagtggtgctgggcgcggcggaagcatcggcatcggtccgatgcgaggacgcggcctcggccgatacagggataggcagtaccattgccaccgaagtggggcccacgcgcagttgcggactgaccgcgctctgcgcgtaggcgtccataatgcgttgaatgccggtaccgcagttctcgcagaggcccaaatcggcgaacaattcagccaaacgcggggtgcgtggctggcatacgccgttgagtagatcgttgatttccaaaccatcggtcaggccgccgagcgacacgatttccaagcgggaatcgaagatattgatcagtgtggggccggagtacgtgtaatcgcgatgttccagtgcgttgaccaatgcttcgcgcagggctatggccgggtattggccggattcgttgatgccgttcagcagggcgctggcttggtcgagctggcgcagcaccgagccggtgaatgtgtgacgttcgcgaatggcgtttttgccattgccctcgaaaatggtggccttgataacgaacgggcattggttggacagcagggtggcaagcgacgattcggtggcgctggtgaaggtgttgttggtgccggtgttggtgatgctgccggcggggacattaccggcatcggcagagacggatgcagccatgttggtcacaaccgggctttcccaatccttgccttcactggcaaaacgaccctgtgcgtatgtgaaagtgagctcaccgctatcgcctgcgacggtctggcccgatgcggcgtgatctacgttgctctccgttgtccccatatcgccgatggtaccggtgcaagccgacgttacgccgaggtgttttacacccctacggctagacttacacgagtttggccccgtagctcagctggatagagcatgtgacttctaatctcaaggtcgacggttcgagcccgtccggggtcacgatgtaataagcccttggtccctcatcgtttgtgaggggcaggggcttttgaatattatgccggtctgggtccgtctggagcctgaactgtcgaccttgagattagaagtcacatgctcatcaccaccatccgggaacacccttaaggggtgcgtctcctgcataacggctatactctgacttgagatgtgctggataataaccagctatcgcgcgtccgccaatggcgacgaacgagggaagaaggcccgtgccacgagcaatcatcgaggtaagaaacctacgcaaggaataccccgtcgaggatgagacggtggtggcgcttgaccgtgtcaatctcagtatcccgcaaggccagatctgctgcattttcggcgaatccggctccggcaaatccacgctgctcaaccagttggccggcatggaaaaaccgacgcgcggcggcgtgagaatcggcggcgtacccgtcagcaaactcgacgagcgtgagctggcggccttccgccagaagcatcttggcttcgtattccagtcgtacaacctgctgcccaatctgaccgcgctcgaaaacgtggcaatgccgctgatgttccgcggcgtgcccaaggaacagcgcgaacgtgcggcgcgtggcgtactcaaacgagtcgggctcggccatcgtctcagccattacccgcgccagatgtcgggaggccaacagcagcgcgtcggcatcgcccgggcgtttgtgaccaagcccgaggtggtgttcgccgatgagccgaccggcaaccttgactctaaaaccaaaaccgaggtcatgacgatgatctgcgcattcgcccatgacttcaaccagaccatcgtgctggtcacacacgatccgcagatggcctcatacgccgaccgcatcgtcaccttgctcgatggccgcatcaccagcgatcggctcaacaccgacctttcccgcccaactgttccgtccacgccgtccgccccaaccacaccaactacaccgtccacgccgtccgcccatagaacccaaggaactgaccgatgaagcacctctcccaccacaccatcgccatcatcgtcgcgttgctctccacgctgtcactggcacttgccgtcatctcccttccgcatcaggcgtacgcggtcgacggcacagacggcacaagcggcacgaacagtacgtctcagggaagcgacggcgattccgcgccgatcgccggaccggtgcccaacatcatcatcaccaacttcgcgtatggaggtgattccgtggccgccggatccaaattcaatctcgacttcaccttccagaacaaggggcaggtggcggtgacgaacatggtcgtcaccgtggacggcggtgagagcttcgccatcgcgggaggcacgaacacgttctacgtcgacgcgctgtgggccggttacgccatgacgcaaagcgtgccgatgcaggcgctcgcctccgcgaaaagcggtgcccagtccgtgaccgtgaacttccgatacgagtatgtggacgccagcgcccgctcctcaagccagtctgacgtcaagatttccgtgccgatcagtcagcctgaccggttcgaaatcagtgatcccgtagtgcccgaccaggtgatcgccggccaggaaaacacggtcacgatggaatatgtgaacaagggcaaaggcgatatcgccaacgtcgaggccacgatggagggcgaaggtttcgatgccacgatgaaaacccagtacgtgggcaatgtggcttccggcgccaccggcacgattggttacgccttcacgccgcacgcgtcaggcgagctgaagaccacgctcaaagtcacgtacgaggattccgacggacagaccaagaccaaggaattcccgctcgccatacccgtaaccgatatgcagccgatggatgattccggcatggccgatccgaacatggaacagaacgccaatcagggattgccggtgctggtgtatgtggtcatcgtcgtgatcgccgtggtcattatcgtggtgattgtgctgctggtgcgtcgccggcgcaagcagaaggccaagaagaacgatattgatgaggactgggatgattggtccgaaggcaaggatgataagaccgataccggcgtgacggatggtgctgcggcagacaccgctcctattgcaccagcctcaccagcctcaccggccggcccgtcccacaaggcctgaaaggcccgaccatgcgattcggcgacatactgcggctctgcagacaaaacctatggcggcgtaaatcccgtacgattctgaccgtgctgggcgttatcgtcggctgctgctcgattgtgctcatggtctctttgggccagggcattaacgagcagaacgagaagatgctcaaatcgatgggcgatctgtccatcgtcaccgtgtacaccaacggttatgccggtccgatgggcggtggcggttcgtccgagatgggcgataccaagcttgacgacaaggccgtggaatccttccgcgcgatgagcggcgtatccggcgtgacgccgatgatgaacttcccttataacgtgacggccagagccggcgcgggcggccgttacctctacgattacgtgcagatcatgggcatcgacatgacccagttcgaccagatgggctacaagctcgtcggtggcgagaagccggtcaaaaaggatcaggtgcttgccggcgaatggttcgcctatggtttcatggacaccctgaagaacggcgaacaacgcaccagcacacgcggcggtcagtattcctcatgcacgtttgaccagaccaccggccagtgcgaggaagaccaggacgaggatccgttcttcgacccgctcgccacgcaaatcagtctgaccaccggcaccaattatcagggcgaccagtacaccatgaacatgtacggcggcggtggcggcacaggcggtgcgggtggcaacaccgcgggtcagtcggaaaacgtcacctttgatgtgcgggcttccggcattgtggcgggcgactataacaaaggctatgccacctccgacggtctggtcatggatttgcaggcgttgaaggaactggccgccaaagtcgatccagccgccgccaaaaaagccaccgcctataatcaggtgctggtcaaggccgccgacctcaagtccgtgcccgaagtcgaatcacagatcaaagcgttgggctacgagacctcctcctatgaagacatgcgtaagtcgttggaagaacagtcgcgcgcgattcagctgattctgggcggtatcggcgcggtttcgctgttggttgcggccatcggcatcgccaacacaatggttatgtccgtaaccgagcgcacgcgcgagatcggcattatgaaggcgcttggctgctacgttcgtgacattcgcgtcatgtttcttgcggaggccggcgcgatcggattcttcggcggattgatcggctgcgtgctgagcggactgatatcgctgggcatcaacgttgtcggcgcgttgtatgcgggcggcatgagcggcggcatgtctggcggtatggtcagcggtgcaggcgggggctccggcgacggtaccggtggcggaacatctatctggaccatactctggcaggcgatagttggtggcgagaatgtgacccgttattcggtgattccgtggtggctgttcctgttcgtcgtactgttttccacgctgatcggcttgctgttcggcttcggcccggccaataaagccgttaaaatcccggccctagacgccatcaaaaacaacgagtgatcgcctctgccacctgctccaccgttagtccataacgttcgttcagttcgcccagcggcacgcggtcggtgaattccttggctgcgccgaagttcagcacatgaggattacggctgccgtccgagacatgatgattcgcataatatgcggtcactttctcgccccagccgccttcaagctgcccgtcttcaagggtgatgacctgctggtggccatcacgcaacgactccagtacgtctgaatccagcgacgtgcactggcgcgggtcgataaccgttgccgtgatgccataatcggcagacaatgcggcggccgtctgctccgccaacggatacgcattgcccagtccgataatcgcggcgtgcgagcccgtctgattgacccgccaatccagcatgtgacgcacaccggcatgctgagccgttacgctaacggtcccgcggactgttgcggcagatatgcccccgctggcggagctgacggagactggcagcgaagttgactgggggcggtcagcgatctgcccacccgtcaccggcagcagcgtcgcatcccgttccgccgtcagaatcgcctcgcccggcactcgaatcaccaccggaccagcaggggcgtccgcagaaccggccggcgcggtagcccatgccagatcagctagatagtcgcgagccgaagtcggcaccagcatcgtagcccctggaatattggagaacatcgtcacgtcatacgcgccggaatgcgtattgtccgaaccggacaggccgcccagaaaatcaagtaccgtgactcgcgaacggttcaggctcatctcctggaagaactggtcgtacgcgcgctggaagaaggacgccgtggtggccaccaccggcgtgccacccgcccgtgcgatgccggcagcgtacgccacggcatgcgattcggtgatgcccgtgtctacataatgtgcgcccgcgcgctctcggaactcatgggtgatgccgttcgagcccggcgtggcgggggagatgaccacgagtcccggctcggcggcgaaacgcggttcgagcgcggccatcgccattttgccgtaatgcttgcgcggatcgtccggcttgccgattgcggcatccggattctgccaatgcgaggcctcgcactggccctcatgcggttcatgatcggacaggttgcagtgatccgaatgccacggctcgctgtggttcacgttatcggtgggatgcacgccggtgggggagtcgagcgaaaccggtgaggccgaggcggtttgccgatctgcgtgagtctcctcaccgtcatatcccgcgcccttcagcgtatgaatatggaccaccaccggatgatcgatatcgcgcacttcctcgaaagctgcgaccagcgcggaaacatcgttgccggcctccacataccgataatccaagccaaacgcgttgaacagattcggctgggcggtgccgccggacgcgcgcaggcgggcgagcgggccgtacatgccaccgaaatcgccggcaatcgacatctcattgtcgttgaacacaatgatgagattgccgccctgctcagccgcgttgttcagtccttcaaacgccacgcccgaactcagcgaaccatcgccgatcacggcgatcacattgccgatgccgctgttcgggccttccatatcgcgggttttcgccaaaccgcaagccaatgaaatcgaggtaccggtgtgaccgagcacgaactggtcgtgtttgctttcgtccggattggtgaagccggtcacctcgctgaaacggtccgggtccagataggcggcggcgcggcccgtgagcatcttatgcacgtagctttggtgggatacatcgaacacgatgcggtcacgcggcgaatcgaatacgcggtgcagggccaccgtggcctccaccatgcccagattggagccgatatgaccgccgtgttggtggccatatgccagcagcgtggcgcgaatctcacggcagagttcggcgagctcgttgggggcaagggccttgacctcggccgggctggcaatgcggctcagcagatgggagtcgtcgccgtgggaaggggtaatgctcgggggggtgtcgtgaaggcgcgtggtcccctcggcagcgccggagacggcgaaggaatcgcttgaatcaaatccgtttcctgacgcgctgcgcataccctcgaatctcccttcgctagtctttccgaagttgaatgctaacgcccggcattgtccgaggtccacatgacgaatcaatgcccccaacatctccgtaaatgggtgattcgttcgctgcgcgatgtgggacaatgaatgcggtaattccttttgataccaaggagcgcgcaatgaaggccgtatacgcatccaccgtcaaccatgacgatccgcttgccgcgttggcggtgggcgagcagcccgaaccccaggcccgcccgttctggtcgaccgtttcggtgcgcgcggtgaccgtaaaccatcacgacgtctggtcgctacagggtgtgggtctcgccgccgaacagacgccgatgatcctgggcaccgatgccgtgggcattctggacgaggacatccccggcaagcatgggctcaaggccggcagcgaagtggtgctgtacacgttcgtcggcaccgatggggcgggcgtggccccgggcgagcgccgtacgatcctctccgagaaataccccggcacgatggccgagaagacttccgtgccgtccgccaacgtgttcgccaagcccgcaaacctcaccacggccgaggcggccgcactcggcaccagctggctgaccgcctactcgctgctgttcgaggccgccggcatcaagccgggcgactccgtgctcatccagggcgcgggcggcggcgtatccactgcggccatccaactcgcccatgccgccggtctggaggtgttcgtcacctcgcgcgacgcgggcaagcgctccaaggcgctgaaacttggcgcgaacgtcgcgctggagatcggtgcccgcctgccgcgcaaggtcgatgcggtgatcgaatccgtgggcgcggctacttggagccattcgatgaaatccgtgcgccccggcggcaccatcgccatctgcggcgccaccaccggcgaccagcctggtgcggagctcacgcgactgttcttccaggacatccgtgtgcagggctgcaccatgggttcgcgcgaggatttcgcacgattgctgcgcttcgtggagcacgccaatctgcatccggcgatcgactccgtggtcagcgggctggacgccgcgcccgaggccttcgccaagatgattgccggtgacgtgttcggcaagatcgttattgagctgtaagcctcacagaattatgtattgagaacgattcgctgcgtggcttaactccgctatcaggagtacagtgggccttattctcaataactagggagtaaatgataatggcaaatgaatccaagcccgaagtcgcggtggtcatgggatcctccagcgactgggagaccatgaagcgtgcctgcgatattctcgaccagttcggtgtcgtctaccacaagcaggtcatttccgcgcaccgcacgcccgagctcatggccgagttcgcgcacaacgcccgcgccaatggcctgaaggccattatcgccggtgccggcggtgccgcccacctgccgggcatgatcgccgcgcagaccacgctgcccgtaatcggcgtgcccgtgcgctcccacgccctgtccggctgggattcgctgctgtccatcgtgcagatgcctggcggcatcccggtggccaccaccgccgtcggcaactccggtgccaccaacgccggcctgctcgccgtgcagatgctctccgccttcgagccggaactggccgacaagcttgaggattaccgtaacgaactgaaggaaaaggtggccgaatccaatgcccagcttgtctgaagaaacgggcggccgcgtctccatgctgatgccgggctcgaccatcggcatcatcggcggcggccagctcggccgcatgatggctctgtccgcccgctacatgggcttccgcgtcggcgtgcttgacccaacgccgaactgcccgaccggtcaggtggccgacttccagatcaccgccgagtacgatgacaaaaccgccatccatgatctggccgtgcagtccgacgtgctcacctacgagttcgagaacgtggacgccggcgccatcgacgaggtgcgcggcatcaccgccaccccgcagggcaccgacttgctgcgcgtgacccagcaccgcgtgcgcgagaagcagttcatcaacgaccacggcaccgccaccgcaccgtggcgcgctgtcaacaacttcgatgagcttgacgccgcattgggtgatattcattatccggccgtgctgaagaccgtgtccggcggctacgacggccacggtcagctcgtgctgcgttccgacgccgacttggagaagatccgctcccgctccgaccgtggtggtggcttcccgccgagcatcctggaaggcttcgtcgacttcgcattcgaggcttcgattctggtctccggcaacggcaaggacttcgtcaccttcccgattgtacgtaacgagcaccgcaacaacatcctgcatatgaccatcgcccccgccgaggtgtccgaacatgtggctcgcgaagcgcatgaactggcgattcgcctggccaagggcttcgaactggctggcacgctggccatcgaactgttcatcaccaaggacgatcaggtcatcgtcaacgagctcgccccgcgcccgcacaactccggccactacaccatcgaggcctgctcgatggaccagttcgacgcccacatccgcggcatcgccggctggcccctgcccaagcccaagctgctctcgccggccgtgatggtcaacgtacttggccagcatgtggaaccgacgcgcgcgctgatcgccacccacccggagtggaatgtgcacgactacggcaaggccgaagtgcgccacgaccgcaagatgggccacatcaccgtgctcaccgacgacccggccaagacggtcgctgaccttgaggccaccggctgctgggacgacctgaaaaagaaggcgtgaccttaccgatggttgaacatatcgaacgccagaccaagcagaaggacgcgattcgcgccgccttggccgactgcgaggagttcatctccgctcaggacctgcaccgcaggctggaggacgaaggctcgaaaatcggcttggccaccgtataccgccagctcaacgccttggccgatgccggtgccgccgacacgatccgcctggacggccagcagctgttccgcctatgcggcgacgacggacatcaccaccacttggtgtgcaagcggtgcggcaaaaccgtggaaatcgacccgcccagcgaggcttggctgcgcaaagtggccgacggccacggcttcaccgttgaatcccacaccttggaggtcttcggactgtgctctgattgccaaaaggagcagaaagcgcagaaggctcagaaagcagtgagcgaataacaaatgggatcggcttcaaagccgatcccatttgttattccgctgctattccactgacttcagcgcgccgagcatgctgtttcttcgaggtcgtgttctgcacgatgcctttcacgccgtccagcttcatgagcttggcgctgcgcgactccacattggaggtctcgtggttcttgagccgcaccatataggcgttcgattggtgctgctcgccgaacacgtgcttacagccacccgaagtcatgaacatgaaatgcccgaagtagggaagccggcttgtcacgcagctcgcgcttggccgccacccaggccggtatcacggcgctcgcccacgccaccagggtgatggcagggtggaacgccagcatgacacgccgatgtaaatgcaaatgataataattctcaatacatgttattctgtcgtgttggtggctgggcgatgatgcagcaacagcagcatcgcccagccgttcggctaattagagaggaaaacccaatcatgtccatcatgtccaacgccaagcgcgcgctcgccatcgcggccgccgcggcgaccctgctctcgatggccgcctgcggttccagcaacgccgccagcggcaagtccgattccagcggcgccgcgtcttccggcaagatcgaggtcgtcgcctccatcaaccagtggggttccgtggccgaagacctcggcggcagcaacgtcgaagtcaccaacatcatgaccaagaccaacgtcgaggcgcacgattacgagcccaccagccaggatgtcgccaagttcggcaccgccaaggtggccgtagtcaacggcgccgattacgacccgtgggccaccaaggccgcccagccgaccaaggccacgctggtcaccgccgccgaaaccgccggcatcaaggaaggcgacaacccgcacgtctggttctccgccaaggtgcgttccaacaccgccgacgccatcaccgccgcctaccagaaggccgacccgagccacaaggacgactacgccaagctcaacaaagaatggcacgccaaggaagaccagcttgagtccaagatcaaggagatttccgccaagaccgagggcctgccgtacgccgccaccgaatccgtggcctggtacctggccgacgacctcaagatgaccgacgccactccgaagggctacgcccaggcctccgccaacgagagcgagccgacctcggccgacatcaaggacttccaggacaccctgaaggccggcttcatcaagatgttcgtcttcaacagccaggaagcaaactccactactgaccagatcaccggtgccgccaaggacgccaacgtgccgattgtggagctcgccgagcagatgccgaagcagtacaccaacctgctcgactggatgagcgcactggtcgaccagttcgccgccgccgtgaagtaatgcggcagtagccgtcaatccgcaacagcgataaggggaataatcaagtcagatagcgaggcgttgtctaggggagaacagaacacttcgctatcagggataggctccttatatatcagggtgcttcggggatgtcccgaggcaccctttgcgttagggtgaatagttaggaaacggtaagaaaaatagtggaactatggattttccaaggttcagcggcaacaatatgcccttgaaaagtcacatacggaaacaggcgaatgagcgagaacactagtaataccaccacagtgaaaccccatttcaagctttgggccaaaaaggtcgaagccaatgaagtcgcgccccaacacccccacaagcccttccccggctgggtgtacggcgtgctcttcgttatcttcgacatcattgtcgtgacggcgctcgaagtgggcgtttcgtccagctccacccgtgtgcagctgtccagtccgaccgtcggattcggcttcgtgagcaagatgtggaccgacggcaatttcgtattcgtgctcaacgtgatacttgtcgcgttgctgtacctcatgttgctgatgctgttcaaccggttctggacggcaagcatcgtgattcttgcggtcggaatcatcgtggccgccatcgaacatttcaaggtcgagatccgttacgaggccattctgcccgccgatctaggcttccttggctcgaacaccggcaacatgctcaccttcattccggccggtgcgcatgtgaccatcctcgtggcactcggcgcgttcgccgtactgctcgcgctgattctggtgctgcgtcatttcgatgggcgcaaaggtcgcatgattcgtacggataacctgagcctgaacctcacctcccgtctgattcttctgctgctgccgattctggtgttcgcgttgtactgcattcatgtgagcaccaccgattcgctggccaacaagttctcccgcgccttgggagacacgccatccatgtgggattccgtgtatgacgcgcagcgcaatggtccgctcgtggccttcacccgccagctcaaaccgaagatcatggacaagccgagcaactactccgaggagaccatgaagaaggtcgccgctcgctatcagaaggaagcggagacaatcaacgcctcccgcaccaacaacctcactgattcgacagtggtgtacgtgttgtccgaatccttctctgacccgagccgcgtgccggaactgaagaccaataaggattcgatgcccaacatccgcaagatcaaggcgggcaccacctccggcctgatgctctcctccggctacggcggaggtacggccaatctcgaatacatgggactttccggcctgagtatggccaatttcgagtcctccctgtccagcccgtaccagcagctggtcccgagccagcattggactcccaccatcaaccagctgtggggcgcgcccgtcaactcgctcggctaccacccgtacgaatccagcatgtactcgcgtgccacgaactacaagaagttcggcttctcgcacttctacacgttgaccggtccggacgtgatcaagtatcaggacaagatcgacgagtcgccgtacgtctctgataagtcttcctatgattctgcgttggaaggcatcaagtccggcaagacgaacaagttcattcagatcattaccatgcagaatcacatgccctaccacgagtggtatgagaataacgactacaccgccgaatccaccacgggtacgccgctgggtgatgatgaacagcagtcgattgagacctatcaaaagggtgtggagattaccgatcaggccactcaggagttcctgaatgaactggatgcgctggataagcccgtcaccgtggtgttctatggcgaccacttgccgggcatctactcgtccgccagcgaggatgacaacaactccttggccctgcacctgaccgattacttcatctggtcgaataaggcttccagctcccaaggcaataaggcaagcgatgcagcctactcctcgccgaacttcttcgtggcgcaggccgccgatcacatgaacgccaaggtcagcccgtatctggcgttcctgaccgaaatgcattccaagatcgccgccatggaaccgcctgtggtcaacaagatccaaggctgggatcgtatccccgaaggccagaacatctatcttgatcagaacggcaacccgatgtccaccgatgacttcgacaaggaaaccaagcagttgcttgccgactacaagctcatccaatacgacatcaccgccggcaaaaactacctcaaagacacggactttatgacgctgccgtaaagcagacagcctagtaggctgtctgtaggcagcgtgcgagccgacagacgagccagcaaggcgcggggcgtagcccgtccaaaattgcagtagcgctgccgtaaagcagggggtgctttcatgacgaaccagactttcgaacaactgaagaagacttacgaatccggtcgtacccggccgctggcatggcgccgcgcgcagctgaacgcactacgccgtctggttacggagaaccgtgatgcctttgtctcctcggctatggctgacttgggcaagcccgcggctgaaaccgtgctcatggaactgaacctggtggctggcgaagcacagttcgtgcgcaatcgtctgagcctttggaccgcccggcatcccaaagcgatgcattggatgttgcagccggctgccggatggacaattgccgagcccaaaggcgtggtgctcatcatttcaccgtggaattatccggtgctgctggccttggaaccaatggctgatgcgctcgctgccggtaacgccgtctgcttgaaaccgtccgagctttcaccgaatacgtccaagctccttgctgagttggtgccgcaataccttgactccgaggccgtgcgcgtggtcgaaggcgggcccaaggaaaccggcgaactgctgaaatgcccgttcaaccacatcttctataccggtggcggccacgtcggcaaaatcgtcatgcgcgcggcggccgagcatctgacgccggtcacgctggaactcggcggcaagtcgccatgctttgtgaatcgcactgcggacatcaatgtggctgcacgccgcattgcgtggggcaaattcaccaatgccgggcagacttgcgtggcacccgactatgtgctcgccacgccggatgtggccgaggctctggccgagcgcatcgccgtagccatcaccgaattctatggcgaagatccgaaggcctcgcctgattttggtcgtattatcaacgatcgtcattttgaacgactgtgcaagctattgccggtcggcaccgtgccgcctgaggagccgagctcgccgctggtgcaggtggcatcggcggtaggcgcggccatggatatggttgggcggcgcttcaatgccgtgactactgggcgcggtggcgcgggggagatggccggcagcgcgaacaatgcggcgaagccgacggccggttcgaatatggcagccgctgatgatggtgcgactgcctcggccgctgttgagccgagcgagattcacaaggtgcccggcgtgttcgacctggccggtcgaatcgtttgcggcggcaaggtcgatcgtgccgcccggtatatcgcgcctaccgtgctgtacggtacgtcgccagatgcgccagtaatgaaggaggagattttcgggccgattctgccgattctggtggtcgaggatgccgagtccgcaatccgattcatcaacaagcggtcccggccgttggctgcatatgtgttctcgcgcgatcacgaggttcggctgactttcgaacgtcagaccagctccggagccttgggatattcgctgccgttgggccatctgctgtccagccggttgccgttcggtggcgtgggcgcgtccggcatcggcacctaccacggcaaagcaggcttcctcaccttcagccacgtcaaaaccgtggttaccaagccgcagttccccgacactctgcgcctcgtgtacccgcccttcaatgaagccaaggccaaactgttcgacatcatcgccaaattcagctagcgtgatatcgctcgctgatattgggtgatggcgttgtcatagtgacgttcgctgtcccggtaattacgtcaatcgattgattcgtgtaccgggccagatttttctgtcctagtatttgatttcgggtcatttttgcttaccgggacaaaactgacgccggaagtatcgtccgcgtattacgaaaatggcggaatagtgcggtttcgtatggaagggaatttcaaatattcctatattcgaggggttcagctgtcctggtttgcgaaaaagagccgaaatcggctaccgggacagaaaaatctggcccggtagccacgtcaatcgattgacatgtctgccaggccaaaaatatgcagcagatgcgccgcttctgttacttcagggctttgaagccgatgtcgtggcggtaaaacagtccgcgcagctcgagcttgtcgatgattgcgtagaccttgtcctgggcggacttgatgtccggagcggaggtttcgacgagcagcacgcggccagagttggccacaaggttaccgtgctcgtcagaggcgacaccggcgtagtagacgtgcgaatcctcgtcgacttcgatttcgggcacacgggcacccttgatgacgttctccgggtagccgttggaggcgatgaccacgccgagggtggcgttggactcatcccaggtgaattcgggggtttcgccgtcgagaatggcggagatgccggcaccgaggtcggaggtgagcttcgggagcacgacttcggtttccgggtcgccgaagcgggcgttgaattcgatgaccttcgggccgtcggcggtggcgatcagaccggcgtacaggatgccggtgaatggcgtaccctcctcggccatgccttcgacggtggggcgcacgattttctcgatggcctcgtcgaccacggactgcggaatctgcggcaccgggctgtaggcacccatgccaccggtgttcggaccctcgtcgccatcgtgggcgcgcttgtgatcctgggagatgggcatcggccagaaatcggtgccgttgacaaagctcatcagggagaattcctggccgtccaggaagtcctcgataacgaccttggcaccggcggagccgaagcgatggtcgatgaagatgtcttcgagtgcgcgctgggcggtgtgctcgtccatggccacggtcacgcccttgcctgccgccagaccgtcggccttgatgacaatcggggcaccgtgctcgtgtacgtagtcctgcgccatctcgagatcgctgaaggtcttgtattgggcggtcgggatgttgtgtcggtccatgagctgcttggcgaagtccttggagccttcaatctgggcggcggccttggacgggccgaacgccttgatgccggcggcggcgaaatcgtccacgatgccttcgatcagcgggacttccgggcctacgaacacccagtcataaccattgttcttcacgaattcgataagtgcggcgtgattcgactggctcagctgcgtggtgtggatgccgtccttgagcatgcccgggttgccgggagccacggtgacttcgtcgatgctcggtgccttgagcagcgtgtaggcaatggtgtgctcgcgcgcgccggagccgataaccaatactttctgacccatgttgttcctttcctgcggaaagcgagttacttcagtacgatttgcgtgccggtggtgtcggctgcgatctggccgagcacgtaggcgggctcgttgttgtcggcgagcagcttcagcgcctcgtccttgcgagcggggtcgatggccagcaccatgccgatgcccatgttgaagatgttgtacatctccttatgatcgatgttgccagccttctccagcacgtcgaagatcgggagcacgggccaggtgccgagctcgatttcggcggccaagccgtccggaatcatgcgcgggatgttctcgatgaagccgccgccggtgatgtgggccacgcccttgaccacgcccgccttgaacaggggagagagggccttgacgtagatcttggtgggggtgagcagcacgtcgccgagcttttcgccgcccagctcgtcgagttcggtgtccacggtgtagccggcctgctcgaacagggccttgcgcaccagggagaagccattggagtgtacgccggtggagggcaggccgatgagcacgtcgccttcagcgatggtggaaccgtccacgatggcggacttttcggcaacgccgaccgagaatccggcgagatcgtattcgtcttcgtcgtacatgcccggcatttcggcggtttcgccgccgaccagcgcggaaccggcctgtacacagccatcggccacaccggccacgacctgctcaagcagtgccgggtcgttcttgccgcaggcgatgtagtcaaggaagaacaacggctcggcgccctgggcggcgatgtcgttgacgcacatggccacgcagtcgatgccgatggtgtcgtgcttattggccagcttggcgaccatgagcttggtgcccacgccgtcggtgccggagatgagaaccggctccttgtagcccaaggaggccagatcgaacaggccgccgaagccgccgatgccgccgaccacgccggggcggttcgtgcgggccacgtgcgacttgatgcgcttgacgacttcgtacccggcttcgacgctcacgccggcgttctcatatgcttttggcatttggttggcctttctacttattttggctcccctctggaggggagctgtcggcaaagccgactgaggggaggcaagcgcctctggttcaaagaattgttattgagtggattggtggtgagctattcggcatccggctgcacggtgttgtactcgttgccgatgtacttgctcttgtacagcgcgaattcaggcagacgcacacggtcctcgggcgtgagggacttcaggaagtcggcctcgtagtcgtcgagcgcagtggggtagtcgccgttgaagtaggcgacgcacaggccaccgtatggggcgtcggcgttcagtccgatggattcgaccagaccgtcgagcgaaaggtaggccaaggaatccgcgccgatgtattcacggatttcctccacgctcatcttggctgcgatgagttccttggtggtggagatatcaatgccatagaagcaggggtacttcagcggcggggagctgatgcgcatatgcacttcagcggcgccggcttccttgagcagctgcacgatgcgcttggacgtggtgccgcgcacgatggaatcatcgatgacgataacgcgcttgcctttaaccacgctgcgcacagcagagagcttcatacgcacaccttgctcgcgcagttcttgcgtgggctgaatgaaggtgcgggccacatactggtttttgattagacccatttcgttgggcaggcctgctgcttccgcatagccggatgcggcggacaatgaggagttcggcacgccgataaccatatcggcctccaccggggattcggcggcgagacgtgcgcccatgcgcttgcgggcggagtgcacgttgacgccatagatatcggaatccgggcgggcgaagtagatgtactccatcgagcagatggccagctgcgtgttgttggtgtactgcacgatcttgtagccgtgatcgttgaccaccacgatttcacccgggcgaatgttgcgcaccagctcggcgccgacgacatccagtgcgcaggtttcggaggcgagcacgtaggcgccgttcttcatcttgccgagggagagcgggcggaagccgttcgggtcgagtgcgccgatcatggcgtcttcggtcatcagcaggtaggcgaaaccgccatgcaccgtgttgagcgcttccttgagcttgtccataaaggtgcgctgcatcgaacggcgaatcaagtgcatcagcacttcggtgtcggagttcgaatggaagatggcgccttcgtcttcaagcttgcggcgcagtgacgggcagttcgtcaggttgccgttatggcacagagccacgtcgccgtcatggaagcggaagatgaacggctggatgttgtctgtggtgcccgagccggccgttgcgtaacgcacgtggccgatggcgcaattgcccttcagtcgttcgatttcgcgctcatcgccgaacacctgggtgagcaggccgagtccgcgatgaccgatgagatgaccgttatcgttggagacgatgccggcaccttcctgaccgcgatgctgcagcgcgtgcaggccaaaataggtgagtcgtgaggcgtcggggtggccccatacgccgaagatgccacattcctcgtgaatgtcttcgagttcagccgacaagccaaagctcctttttcaaacaggggattaactatctatcaaccctaccaatcggcggctacatcgcgtgttgtggggtggtggaacttgttggggtttgcggacgcggtttaagcaccagatcagtcaagtatgaatagtggcttaggattttggcctttcgctgtttgtggtgggtggttgtggtgtggggtgatgccgacgggtaggttggaagcatggatacctcttacctgttcaccgccgcattacctggtgctccactttgtgctcaagcgtgataccgaattgtcggtgtgacgtgatcggttgactttcgtcaacgcaatttgaaaggctccgacggtattatccgtcggagcctttcgtcgtatgaatccggtgcttgtttttcggcttcgtctcagtgcctgaaatggctgaagaactcgatggtctcgggatcctgcgactcgtccatcacctcagcgggtgtgccgttctcggcgatgacgccgtgacggagcagtacgatgcggtcggccgcttcgtgggcgaagctcatttcgtgcgtggccatgaggattgtggtgccttgggcctttaactcggcaaccatgttgagcacttcgccgaccagcatcggatcaagagcggatgtgatctcgtcaagcagcagcagttccgggtcggtcatcagtgcgcgcgcaatcgccacgcgctgctgctggccgccagagagctgatcggggtaggcactggctttatcgcgcatgccgatgcgttcaagcagttccatagcgcgggtttcggcgcgatccttgctccagtggtgaaccttgattgcggcaagggtcacgttcctgagcaccgacatgtgggggaagaggttgaactgctggaacaccacgccgatacgtgcgcgaatcttgtcctggtcggcacgcgggtcggtgatatcggtattgcccagccaaatctggccgtcatcgacctgttcaagcaggttgacgcatctcatcaatgtggatttgcctgaaccggaaggccccagcaaagccaccacctcatgttggtgaatgtcaaaggaaatgccacgcagcacctgcgtgtttccaaaggatttgcgcacgtcatcaagacgcagcaccgtcttgttgctcacgggggagtcactcgcctcggtggtgatattggtcatttcgctcataccgttcctccgctgagttcgcgcttacgcagacgttccgtgtaccagtcgttcagcaggatgaacggcacgctcatcaggatgaacagcaggctggcgaccacatacggcgtgaagttgtaggtgctggccacgtcgatctgtgcggcgcgcacggcatccaccgcacccagcacggaaatcaggccgacgtccttttgcatggagatgaagtcattcatcagtgcgggcgccactttgcgcaatgcctgaggaatgacgatcagtcgggtcgtctggccggaggtcaggcccaacgagcgggccgaggctcgctgagaaggatgtacgtcgttaaaaccggcacgcagcacctcggagacataggcgctgtatcccattaccactgcaatggtgccgagtaccgagggatcgatacggccgaacaagcctaggccgggaatgccgaaaccgattagatacagcacgacgataataggcacgccgcgcatcacagtcgtgtagatcaatgccaggatacgcagcgggaacagaataggggagcggctggtgcgcaccagcgcgatcagcgtgctcagaatcgccacgccgaccactgcgacgagcagaacgcggatgttgagccataggccgtcaagcacatggggaaacgatttgacgaagtattcgccggagaagaaggtctccttgactcgtggccagccgggggagagcttcaagccgatgacgatgaccaccacgaacacaatggtgctgatcagactggtaatcgtcgattgaatttgctgatgaacacgatattggcgtcgttcgagctcgacctgacttacctcgtgtccgtcaggggcattgtgctgcctggtttcggttggtgctgcggtcatgtgatgaatgtcgctcgcttcctgaatgccgggatggccgggtgccacaggaaaattcccgcagcgcccggccaaggtgttgtgaccttatgatgtaagcctacttcacttacttcttcagttcggtcaggtcggtggtgtactcggccagccacttgtcctgaagcttcttgatggtgccgtcggcgttcaggtcatccactgccttggtcacggctgcagtcagcttggaatccttcggcagcacgatgcccatgccgctcttgtcttcggagtcaggcagacggccgagcaccttggagtccttgacctgctcggactgcaccatgtacacgcattccacggtgctggtgaccagtgcgtcgatctgaccggcgtcaagtgcctgagccagtgcggcatcatcattgaacgtctggatgtcgtccttgatgttcgccttggcgtagtcgtaggcaagggtgccgaccatgacgcccacggtcgcatccttcagatcggataccttggtggcgttggcgaacttgctgtctttcttgaccacgacggactggctgtcgttgtagtagctggacgagaagtcaacggccttcttgcgctcgtcggtgatgccgaactgctggatgttgaaatcccagtccttggcgccgggagcgatggcggtgtcgaatgcggtgcgggtccacaccacgtcgctcttcttgaaaccgagcttgtcggccactgcgtaggcgacggccgcctcgtagccctcaccgctttccggcttgtcgttcataacccacggctcgtaggccggctgtccggtggcgatggtcagcttgcccggcttgtacgtctgctgggtgatgtcgtccgaatcggtggaattggatgcggtggactggccggaaccgcaggctgcggtgaacgacagagccaggatgctgacggtggccgcaatggtacggacgatgtgtcgcttattgaacatgggtttcctctcctcaagtgttcgtcatgcacacggttcaaaccgtgcttgatgcattcgcgccaattgtatggctattgggttacaaaacatcgatattttcggatgctggctatcgccattgcttatggccgactagagccgcgcaatctggcgcgtaagcggacggatatctcatattggcgcagagcgaaatggcgttcactgttcgagtgtgaagccgtcgaatacgaatcccggactgaccacacaggagaccagcgcatcgccctggcctggcactgtgcgctgccagacgccagccggtacgaccgcatgtcccgatacggttacgtcggcctgatcggtggtgatgccggaacccaaggtgattacggttcgcttggattcgtcggattccggagtctcgtcgctgccgccgagctccagttttaccgatgccgggccatgccacagccagacctcatccgcatcgaccttatgccaggcgctggcatctccctcgggcagcaggaagtaaatcagtgacgatagcggtcggcttgaggcctcatccgtgtgcggggattgccagtcacgcgtgtaccagccgccttcggggtgggtttccagtccaaggcgttccactatggaccgggcgtatggactcatgtcttgcaaagcgacgctcataatgagatctcctgttcttggcgggtttgctggtttttggcttcttgatatcaggtcaggtcagcggtgtcaccaggcgttgttgtaggcttcgcgcccggatatcaccgtggctcggttcgtgcctgcgccgtgcctcaccagtgtttccagcgtttcttcgatgccggccggagatgatgtgtcgacggggatgtcgaagaacgcgaaatcagccaatgcgcccgcgttgatttgtccaatgcggttgcggcccacgtgcatgcccatggaggcggcgccgcccagcgtcatcatacgaatcaggcgatgtgtcagatcgtcgctggcatagccttgttcgcgggccaggtcgtaaagcatcgacacatcatcaagcagatcgagggtcggcgtgctggagagcgaatcggtgcccacgcttaccagattgccttcctcgaggtattcgcgcaccggtgcatctttgccggtgttggtaatgcgattcgatcgggggcacaaggccacgcccacgccgcgctgacgtagaatacgccgatcctcgccattggcccacacgccgtgtgcaatgtgcacatccggtccaagcgagccaagctgatcgacgaactggatggcggaggcgcctttgcccacttccttgagctgccggtagctttcccaatcgtggtcactccagtcggccgccgaataagtggtgagcaccggcggataagtgccggcctcgagcggggtctccgccagatggatatgcagtcgcatgttcagctgacgagcaatgtctggaagatcaacgaacggttcggactccagcgtatacggagcatgcgggctgatgccgaggtttggcagctgctcctcgttcatccggcgcaactgccggatgagctcagtgcggcccttttccatccattcggcgttgtgccagcccattacctcccaataagcgatgccgtgcatgccctgcgaagccagcgcgccggcggcgtccaaatcggtgacgatgtctgcggcggccgtcgttcccgattcgaccatctggcgagcgccgtcctcggcccactgcttccatggctgggtcttctgcgcctcggcgtacacctcgttgaatgccagttcccaggcgcggaaccgatcgtaggtgccttgcccgacctgcaccatgccgctgtactgcagatgagtgtgcgcgttgatcaatccgggggtgagcaccccatcccaatgccgttcatggatggtgccgtgagccgtcatttcctgcttcagcgccttcagcacccagcggcgtttacctacatgaaccacgcggtcgccatgtatggcaactgcgccatcgatgatgacggggcccgtcacggggatgatgagtttggcggaatacagtgtcacatcatcgataagctcggtatcgacggtcggccaggtgttgtcggtcatattctcctcgctgcgttgtgctcggtgccgtgtctatggctatcggtcggcgttctctcggtcgttttccgcgaatctggtcagtcgccaattgtagccgttgtcctccacggcatggctggctcggtatccgcgcgccttgagcgcgctggcggcgatgcgctggtcggtcgctgcgtcaagtctgataagcgtgtgatccagtgtgcctcgatgttccagaagatatgcgacggcgctggcctgtacggcgaagctcagatccatgatctcgattggattgccgcctcccaccgtgtagttcacgccatcgccgtcggcgattagcgtgagcgttggtccgtcgggaacattgagttgcacggtgtccctgttgacctgtggggtgaagtcgcttacctcgtccaaggcgatttcgttggcgatgccgccgatcactgcgagcgccgcgccctcgtgcattgcgcgcatgtgctcaagtgtgaccgtatgtctcacgccagtggcggacaccaccatatccgcgcaagggagtgcctcgtcaatgtcttgtgcggcgaagccgtcgaacaccgctttgagtgaagccactggatcgatatcgcagatggtgacttcggcgccaagcgcgcgaatgcgccgtgcgaagccttggccgaccgggccgtagccgatgacggtgacgttcttaccgtcgaatgcatgctcgccgagaatgcgctgcatggtggtcacgcatgtctccccagtgccgtgggcgttgtcgaatccggttttcagcacactgtcgttaacggctacgaccgggtaggtgagggctcccgcttcctgcatctgctggaacgcgcgtacgccgctggtcgtttcctcggccactccaatgaggttcgccgtgagttcggggcgttcgagcgaagcgagacgggcgaagctggcaccatcgtcgatgatgatgtccggctgtatttcgtccagcaggtgcagggccgcctcgtgcgcctgttccgcggtccagtctcggctggattcgaccgtgattccttcccggcgcagctgttccgccactcggggatccgtggaatccgggccgcaatatacgccgacgattgcgccggcggccttaagcttgcgcagcagaatcgcggtctttggctccagtatcagacagacggcaatacgaatgcctgagaaatcgacgcgagtggtgaggctatccatggtgtcgcgtaataccggcatgtgctgttccgcgtactccattgcctccagtccgcttgccttgcgcatatcggtgatggaatcgatgctttgtgtgccgtcgcataggaattcctcgttgtgctcgtcggtcatcgtggcatcttcgacggtcatgccccattgctgggcctgagacttgatttcggcatgcttctgtggctccggaatcgcgagtcgggctcctgccagtgatcgattcgtcttctgggatcgggctgccgcccacgctgcaaaatcgctgtctgctgtaatgcttttcttcatattccccatggtacgcatgcatgccgctgctccgccgctgcgcgtgtggcgtgggtgaagagcgtgcttgggcgcgttgcgtgcgtcgacttcggcagcttcgaacaggcatgttgcatcgaacaaatgttcgactgtgttgatatgctggtcgggccagcggtggtaaggaggtgatggcgatgggcagcggaacggtatcgacgcaacgcgagcatacctatattgccattgatctcaagtccttctatgcctcggtggagtgcgtggctcgtgggctcgacccgttgaccacgcatctggtggtggccgatgaaacccgcaccgataagacaatatgtttggcggtctcaccctcgctgaagaactatggcattcctggccgtgcgcggctgtttgaggtaaaacagcgcctgaatggagtcaacatcgagcgcgcggtccatgctcccggcggccgattaatcggggagtcctgcgatgcgtgcgacctggaacgctcgccggggctcaaagcctcgatggtcatcgccaagccgcgcatggcgcactatctggaaatcagcgggcaaatatatggcatctacctcaaatacgccgcacccgagcacatccatgtctactcgattgacgaggtgttcatcgacgccacgccatatctgcgctcgctgggtatggggccgcatgcgatggcgcgaaccatcgtgcgcgaaatcctcaccaaaaccggcatcaccgccactgccggcatcggctccaacatgtatctggccaaagtcgccatggatatcgtcgccaagcacatgcccgccgacaaggacggcgtgcgcgtggccgaactgaatgaaatgtcatatcgtcggctgctttgggatcatcgtccgctcaccgatttttggcgggttgggcgcggctatgccaagaagctcgagcatgccggactgatgaccatgggcgatatcgcccgatgctcggtgggtcgtgcttcggattactacaacgaagacctgctgtatcgcatgttcggtgtcaatgccgaactgctcatcgaccatgcgtggggctgggagccgtgcgaaatcgcggatatccgatcctatgagccaggtgcgcacagcattagcagtgggcaggtgctcaccggccccgccgactatgccacggcccggctgatcaccaaggagatggctgatgcgctggccctcgatctggtcgataaaagcgtgctgacgaaccgactgacgctcgccgtcggctatgacatcggcagtcttgattcgtcaaagctcgattcgtgcgctgattatgcgatgaaacgtgccgctgagcgggcggcgaaaagctatcaagggccggtgaccatcgaccgatttgggcgcaaggtgcccaagagcgcggtcgggtcgattggtttgggtgatttcacctcgtcgtcggcacgtattcgtgaggctatgacgatgttgtacgagcgcattgtggattcacgcttgcttgtgaggcggttgaccgtcatcgccgatgatgtggccactccggaggagctggccgccggcaaacgctatgaacagctcgacttgttcggtgatgacggggcccaatcgtatggatccgattccaccagcgaaaaagatggagagcatgatatccagcgtgcgctgctggatgtgaaacgtaaattcggccgcaacgccgtcatcaaagccatggacatggaagacggtgccaccggtcaggaccgcaaccgtcagatcggaggccatcgcgcatgaccctgcaagagacccgtgcgtacgacgacatcatcaacctgccacaccatcagtcgcgcaagcatccgcacatgtcccgccaccagcgggccgcgcagttcatgccgttcgcggccctgaccggctacaaccaagtcatcgagcaaacagcaaaaaacgccgaaaccgccatcgctcaggccgaagcccaaggcgataccgatttcggcgcttgacaatcgctctcgttggaggaagtctcagattcgtcagcctacgtgacgttcgaagcggtggaagccggtgatcttgtcgatttcggccatcgcgtcagccggaatcacaaagcccgcggccttcatgttgttctccagttggctgggcttggaggcgccggcgatcacacagctgatctccgggtgctgcaggatccatgccatggaaagcaccggcaggttcgtgccgagctcgtcggccaccttgcgcagctgctcgaccttgtcgaggttctcatcggtcagcagatcgttgatctggtggtcggactgccaggtggcgcgcgagccggccggcagcggctggcccttgcggtacttgccggtcagcagaccctgcgcgagcggggagaacgtggtgatgccgatgccgagcttgcggcaggtgcccatgatctcatgctcgatgtaacggtcgtttaggttgtactgcggctgaaccacggtgatcgggtacaggttgtagcggtcgatgatgcgctgggcctcttcaaggcgagccgaaccccactcctcggaaacgccatagtacagcaccttgccttgggcgaccaggtcgctcatcgcgcgcaaggtctcggtaaggtcggtggtctcgtcaaaacggtggcagaagtacatgtccagataatcggtctgcatgttcttcagcgtctggtcgatgctctcgaaaatgtgcttgcgggacaggccgcggtcgttcacgccttcgccggtggggaagtagaccttgctggaaatgaccagttccttacgcgggtactgcttcagcgtcttgccgaggaagcgttcggccgcgccgccagaataggcgtccgcgcagtcgaagaagttgacgccggaatcgtaggcgagcttcacggtctccttggccacgtcctcagccgccgtgcccttgagatccgtgacccagctgcccagtgcgacctcgctgatcttcagtcccgacttgccaacgctgcgatacttcatgtgtgctccttgataatcaatcgtcaccgtcgtctcttcatggccggccgtgaacgctaacaattcttattgaaacagttcaaccccacttgaacgcaagttggcggctattgcgacacgccggtggtgacttcgcgggcgcaacgaatgaaatcatcaatgacgctccaccgatacgatgtggccggaacgccgaactgaatggcatatgcggtatccgggccgcaatccagcacgcgcaaagtacgcaaccgttcgccgtcaagcagcgctggcaggaaccgctccgggcataggcaggcacccatgccgtaatggcacagttccagcagagtcagtacgttatccgaacgggctgtgactttcggctcaaaaccggcacggcggaacagaatctcgccgatgcggccatcgatgtcctgcggattgcccagcaaaaacgggcagtgtgccaacgaagatagatcgcctgaagcaatggcgcgttcatttggaatcgtgttgggggtggcggaattgttggcaatattagtctggctgttcgcggttccggtggtgactaaatccagccataatgattgcgcaataaccagtgccatacgttcgtcgtagaatctcctgttatcttgagtcatggctcgtgcgaatagcgttgatgtttgcgactgcgggtcatgagatggaatctgagatgaggctgtagccggaagaggagaggatcgcatgctggaagcgggcacgatgttgctgttctgtgcggtgctgtttgccagcgtcgccctcggctggtcgattattcccgcgctgttcgttggtgtgctgctgttcatggggtatgggctggttcgccggtgctcgttgcgcgcgatggcgagccgtgcggccggcagcgtacggtccgcggggaccgtggtggtggccttcgtgctcatcggcgtactgacctcgctgtggcgggccagcgggaccatcgccttcatcgtggcccattcgaccgcggtgattcacgccgccacggtgattccgctgtcgtttctactgtgctcggcgatgtcggtgctggtcgggtcgtcgttcgccagtgcggcgactatgggcaccatctgcatgtcgttgggattgtcgatgcaggcgaacccggtgatgctcggtggcgcgattcttgcgggcgtctatgtgggcgatcgttgttcgccggtttccaccagtgccttgctggtcaaacagcttacgcatacgaacctgttcaatactattgcccgcatgctgcgcacgggtgcggtgccgtttgtgctgagttgtgtggtatacgttgcggctgcggtggtggagtggctgtgcgcgagcggtggttccggatttggtgcggctagtgcggctgctacggctggctcggctggctcggctagagcggctgtttcaaccaacgcaagcagcataaccgatatcggcggattgttctcatcggccttcgatttgcattggcttaccctagttccagcattactggtcatcgtgttggcgttgctgcgtgtggatgttcggctgcttatgctcgccagcattgccgcctcggtcgcggtatgcgtgggcgtgcagcacatggaatgggcagaactgttgcggctgcttattttcggttaccatgcgcaaaatccgcaggtggccgcactcctggacggcggcggcatcctctccatgctcactgtgatggccactgtctgtatctcctccgcctacgccggcatttttgccgagacgcggatgcttgctcggctgcagcaggtcatcgagatgctcggtcatcgcatcggcgcatgtggtgccaccatgattaccgcgacttgcgcggcggcgctcgcctgcaaccaaaccctcaccatcatgctcactcaccagttgtgcggtgggctgtacggcgacgacgaatccgaacgctccgcacaagctatcgatttggaagacagtgccgtggtgatcgctccgctgattccttggtcgatcgccggtgccgtgccgcttgccaccatcaacgcgcccacactcagcctggccgccgcgaccttcctctacctgctgccgctctcgcggatgctcgcctcggctgtacgccgccgctcgggatttcggactcggcatcgatcccaaaatcaaaacccgggactcgccatcccacaccggcccaaacccatgctccacatgttcgctcatggtttccatcctaagtcgggcgattgagcgcacgaggcaatcaggccgagaactgtttgccgaattccgagaagagctgacggcgggcgaagacgagcaggccgagcagcaccagcagggagaccagcccgctgaccatcaccagtacatcccacggagcccagccgagcggaatgaacgtcagaggcatcagaccagcgacgatgtcgaacgccagatacttggcgtactcgtcaatggccttggcccgcagcacgataagcagcaccacgtcaaagaccagcgaaaccagacacgtgatcggtatgacgaacatggtgacgacatgattcatcgtcgccacaaaccagaccagcgcaatcgccagcatgatatagaaatatcgaaacatgaggcgaagcggccgcggcacgtgcagaatcgcactattgatgaacagcacgctgatgatcagcgcggccgccgatgcactggcaatcggtatcggccacgaaaacagatagctgaagaagccatgcagcagcaaaatcgcgccggttacaaacgtgatgatttccaccgccaaacgcctcggacgcagatagatctgctgcgcggggaatgcggcgggggaggcctcgccgcgcaattcgttctggcagagcgggcaacgggccatatcgccggtgaaatcgacggtgcaggcatcgcaatgcttcatgccgacgctcctttctccacatgcacgccagcgatgttcatacggccgctgatgccctgcgcggcgagaatccgacacaggttcttgatgacgttcagatcatggtagatggtggagatgccgatgctcaggtcgtcgccgaacgagcagaccgtgaaattcaggctggccggtgtggtgaggaagctcaccgaacgtacatggcgcgcgagtcgttcgtccaaggtgactcggccaaggttcgagacggtggtcgtggtctcgcggtcggcgatgaaccgggccagctccagcacccagtccttggcaggggagggcgcaagacgcagcaccggattcttttccagcgcaatcatgcggttcatatgcgattcgacgcgctcgcgactggtggcatggccgagctgctcctgcacatggcgggcgatgtcggccaacggctcatcggtcagcaatccacccataccgttgccgtgcgcggtgcgggcggcggactgctggccgtcgccggctgcgtctgggcttgttgcggaagttttcgcggagtcctcatcggcttcgatttcggccggcgtgtacgccacgtaagtcatgccgtagaagttgcgcacggtctccgacctgaagaaggcgcgcaagtcgaccggaatatccacgcgaatcgcgcgattgcgggcgcgcgagggcatgacgtcgcgaatcgcgcacagtatcgcggcgatgaggtaggaggtgagattcactccgcactgatgcgctgcaccaagcaccttgctggcgctgacgtggtattccatgaacgtaggcgcggcccggtcgatggggccggccagccggtagatcttcgtgcctggcgcagcgccggccttgtctttctcgtagtatttgtcgaagctgttttcggctttgtcgctatccgaaccgtcgtaatccgaaggcacgcccggcacgtcgtatcgctcggcgatgtaggcgtgcagcagcgacttgaacaggttgatggcgccgcgaccgtccgaaatgatgtgcgagacctcgagattgacacgattgcggaaatagcttacgcggaacagcatgcttttgggcccgtaatgcagtcgcgagcatatcggcagatgttccggctccaccagcggccggccgtctgactgttcgaggtaatgccagaacatgccgttgagcaggtgcacgttgaagctcgggaactgggcgatggcatggtcgagcgcgtgctgcaggatgtccggatcgatgccgtccgccagctcggccgaatagcggaacacggtctgcgaggagcggccagcctgggaggagtagaacttgccgatgttgtctagtcggtaccaagtacgtcttgccacgcgtcgcctccctccggtgcgttggcggtggtgccggtgccgggagctggttccagcggtgtgccgtcgaggaaatgctcgatgattcggtaggtggtggccaccagtcccacggccgacgtattgagcaggtagccgtggatgccatcgtgaattcggtaacaggagacgttgtcgttcaccaattgcaggcgacgggcgtacgcttcgtcctcgtctctgagcgggcagtattcggcggacaacaccagcgtgcgcggctgattgctcaggtcgtgcgcggtgagcggcgcgaaatacggattggtcagatcggccacggacgaacggtacatgtcgatgtagtcggccatgtcctgtgcggtgaggatgtagtcggtgccgttggtccgcaccgattcgaacgggctggtctcgggattgtaatcgttgccgactaccgggtaaagcagcatctgcgtgcgcggcatgaactcgccgcggtcgcgggccatgagtgagacggcggccgcaagattgccgcccgcgctgtcgccaaacagcacgatgctgtcgggatccggtgctgggattgtcgcagatatatcgcccccgccggcgggggctgtcggcgcagccgactgggggtgatcaacatcaacagaaccacccaccccagaaatcggcaattccccagcaaacagctgccgggctacctcatagcaatcctcaacagcagtagggaagcggtattcaggagccagccggtactcgactgagatcacacggcgttgcagacgtacggccatatgcgcgcaagcctgcgtgtacaggttgatgccgcctgtggtccaaccgccaccgtggaaaaacaggatcgtgccacgcggcgtgactgagggaagttccgtgttggcattgccggaaataccgtcggcgttgccgctcgacgtgctttccttgatgagtattttgggtaggactttgggtaatacggcgggcagaatcgcggatattgccgaggccacgggcgtgccattggcggaagattcctccagggcttcgggcaggggcgctccataggcgaccagcggcgtgaacactcgcaatggtacggcatatccatccgccataggcgcgaaggcgtcctcgacacggcatttcggattgtcgggtgcctgcttggcgataagctcttccgccacgcgctgcaatttgtacgacttgcccgcgttgggcttgatgtagctggcggccttcatcgcggcgaacaatgcctcgttgatcggcatgacgacaggtcctttcagcggcggattcggtagtgcgaacaccccaaccttagcccatgaccggcatgaacaaaaaagggaaggaacccgagagttccttccctgtgtgccgtatcagacgcgatacgcgccgattatcaggcggtgaagtattccacgccggcctcgaagatcggctggtacttgttgccgggcacgttgacgtacaggccgttgccggaacgctccgagtgacccatcttgccaaacacgcggccgtccgggctggtgatgccctcgatggcgagcagcgagccgttcgggttcacatccaggtccatgccgggggtgccggtctcgtccacgtactgcgtggcgatctggccgttggccctgagctgggcgagcacctcgtcggaggccacgaagcggccctcgccgtgggagatggccacggtgtgaatgtcgccgaccgaagtcttggacagccacggggagaggtcggaggccacgcgcgtgcggaccagtcggctctggtggcggccgatggtgttgaaggtcagcgtcgggcaggcgtcggtcatcggcacgatgtcgccgtatggcaccagacccagtttgacgagcgcctggaagccgttgcagatgccgagcatcagaccatcgcggttcttcagcaggtcacgcacggcctcggtgacggccggcgcacggaagaacgcggtgatgaacttggcggaaccgtccggctcgtcgccgccggagaagccgcctgggatcatcacgatctggctcttgttgatctcgtcgaccaacgcctgcgtggattcggcgacggcggccggcgtcaggttgttgacgatcagtgtggtcacatcggcgccggcacgctcgaaggcggcggcggaatcgtactcgcagttgttgcccgggaacaccgggatcaccacatgcggcttggccacggaagagccgacgtacacggtcttcttcggcgcgtggaagtcgatggtctcgacggtcgcgcccttgtcctcgcccttggaacggtacgggaacacggattcgatgccggactcccaagcttcctgcacagcgtccaggtccagcgtctcgccggcggccttgaacacgtactcggaggtggtggtgccgatttcgccgatctcgaccaaattggagacggccggaagcttggcatcgtccgccagctcgacgatgaacgaaccgtatgccggggtgaacaggtcgtccacggcgatgctgttgttcagggtcacgccgatgcggttgccgagcgtcatcttgaacagggcttcggcggtggcgccatagcccggcgtagagacggccagggcatcgtggaagtcggtgagctcctcgatcacggagaacacctcaagcagcgcatccttgtccggggtcagaccgtcggccaggtagcgcggcgcgatgcgtacgatacggtgatcggcgtccttgaattcaggggaggtggcgcgcttcatgttgcccacggccacggcgaaggagatcagcgtcggcggcacgtcgagatcctcgaacgaaccggacatggagtccttgccgccgatggcgccggcgcccaggtccacctgggccatcagcgcgccgagtacggcggccgccggcttgccccagcgttccggctcgtcgcgcagcttctcgaagtactcctggaagctcaggtaggccttctcatgctcgaagccggccgcgaccagcttggccagcgactcgaccacggacaggtaggcgccggtgaactggttcttggacatgatgtacgggttgaagccccacgccatcgccgaagcggtggtggtctcgccgaacaccggcagcttggcgaccatggccatgttcggggtgagctgacgcttgccgccgaacggcatgagcacggtgcccgcgccgatggtggagtcgaagcgctccgaaaggcccttgttggaggccacgttgatgtcggtgaccagcttgttcatgcgttcggccagcgtgccctcgccccacggggtctcgtaggactgctgttcctcgacatgcacggtctggtgcttggaagcgccgttggaggccaggaactcacgggacagattcacgatcttgtcgccgttccaggtcatcaccatgcgcgggtcctcggtcacggtggcaatcaccgtggcttcgaggttctcttcgcgggcgtaggccaggaactcgtccacgtcctcggcggccacgtccacggccatgcgctcctgggattcggagatggccagctcggtgccgtccaggccctcgtatttcttgggcacggtgttgaggtccacgaacaggccgtcggccaactcgccgaccgccacggacacgccacccgcgccgaagtcgttgcagcgcttgatcagacggcaggcatcgccgcggcggaacagacgctgcagcttgcgctccaccggagcgttacccttctgcacttcggcgccgtcgagttcgagcgattccacgttatgcgccttggacgaaccggtggcaccgccgatgccgtcacggccggtgcggccgcccagcaggatgattttgtcgccaggggccggggtttcgcggcgcacatggtcggccggggtggcggccacgaccgcacccacctccatgcgcttggccacgtagccggggtggtagatctcgtcgacctgaccggtggccagaccgatctggttgccgtaggagctgtagccggcggcggcggtggtcacgagcttgcgctgggggagcttgccttccagcgtctcggagaccggcacggtcgggtccgcggcgccggtgacgcgcatcgcctgatacacgtaggagcggccggacagaggatcgcggatgcagccgccgatgcaggtggccgcgccaccgaacggttcgatttcggtggggtggttgtgggtctcgttcttgaacaggaacagccagtcctcgtcgtggccgttcacgtcaaccttgaccttgacggtgcaggcgttgatttcctcggactcgtcaaggccggtcaggacaccgttcttcttgagccacttggcgccgatggtgcccatgtccatgaggcagacgggcttggcgtcacggccgagctcgtggcgcatcgccaggtaacgctcgaaggcggccttgacggtggcgtcatcgatggtcacttcgtccagctcggtgccgaacgtggtgtgacggcagtggtcggaccagtaggtgtcgatcaccttgatttcggtgatggtgggctcgcggctctcctcgctgaagtacttctggcagaattcgaggtcggccagatccatggccagaccgcgctcgtcgatgaacttctggccggcttcggcgtccatctcgttgaaaccggcgatggtctcgaccttgccgggcaccggcacctgggtcttcagggtttccttggtctccaggctggcctcgcgggcctcgaccgggttgatcacgtaatgcttgatggtgtccacgtcggcgtcggtcaggtcgccttccagcgcgtacagcttggcggagcggacggtcgggcgctcgccctgggagatgagctggatgcattcggcggcggagtcggcgcgctggtcgaactggccgggcaggaactcggtggcgaagaccttggcgccggcgaagtcgggcaggtcgtaggccacattgtccacctgaggctcgctgaacacggtgggcacggtctggtcgaacagctcctgggagatgccttcgacgtcatagcggttcacgatgcgcagggccttgaggccggtcagtccgaggatcgtgcgcagttcgcccgcaagctgctgggcttcgacatcaaagccgggcttcttttccacgtacacgcgaaaaaccatggaaatcctttcttgaaattaaagacaattggctcccctcgagaggggagccagataatgcattactcggcgacttcgatgccttcggacttggcgagttcggcgaggcgctcctcgatctcttcgtaggccgggatgatgctgccgagaccacggcggaacaggtccttgtcaaggtgctcgaccttgccggagtggtccttctggtcccacagacggcaggaatccggggtgatctcgtcggccaacagcagcgtgccgtcggtggcgcggcccatttcgatcttgaagtcgaccagcttgacgtcgatcttggcgaagatctcgatcagggcctcgttaatcttgcgggccagcggggcgatctcggcgagatcctcgcgagtgcatacgccgagggccaccaggtcatcgtcgttgacgaacggatcgtgcagatcatcgttcttcaggaagtactcaagtaccggctccttgagcggcaggccttcctccacgcccagacgggagcagaagtggccggcggccacgttgcgcagcacgatctccaacgggaacatgttcaccttgcgcaccagctggccggtgtcgtccactcgcttgataaggtggctgtcgatgccgcgcttcttgagcaggtcgaagatgatggtggtgatgaggttgttcagacggcccttgccggtgaagtcttccttcttttcaccatcgccagcggtggcggtgttcttgtattcgacccacagaacctcgggatcgtcggttgcgtacagttgcttggccttgccctcgtagagcttttccagcttctccatgactcacctttcaggagtggaatttctgggtgaactaacggtaaaagggtaccaatcgagggctacaacaacactcagcatgacgctacgatgcggccggcgcatcatacgtcgctgcatcgaacggccatacgctgttgggatggcggaggcggccgtcattggccagtacgatcagctcgtctccggtcgtgtagccttccggcatgaagatatctgcagaagcgcgtgtgaatactcagatgttcgtcaatagacgaaacatgactcttcggccatatacacacgataatgggagtgacgaaatggtacaaggaggttcgtcatgatcgttcatccacgacccggacggcaataatattgaggccatgctgagctgatcaggccgtggactactccacggtaatcgtcaacgcatcggccacgaggccggccttggcacgggcgtcggcttcggactcgccgacggccagtgccacggccatgcggcggtggccatgcacttcgggcttggcaaaaatgcgcaggtccgtgccgggttcggccagagcagcggccacatcggtgaactcgacctcaccgtcgccggccaccacaatcgcatggcttgccgccaccgagccggccggaatcgtgagcgacacatgctcgggggtgatcggcaggccgagaatcgcgcgggcgtgcagcgcgaactcgctcagacgctgggaggccattgtcaccataccggtatcgtgcggacggggggagacctcgttgaacagaatcgagccgtcggtgagcacgaacagttccacgccgaatacgccccaaccggtttcgccggccgcctgagccttggccaccaagccttcaacggcggtacgtgcgatgtcgcgcgcccgctcggcctcaccatcgggttcggtagccggctgccaggactcgcggtaatcgccggactcctgacgttggccgatcggcgcgcacgtcacaatgccggcggacgaagaaacagtcagtaccgtcagctcacgctccagcggagcaagcgcctcaacgatcacgcgcgacacatcgccctcatcggcggcgcggcggccctcctgcgcttcggtccaagcggcatcgatggcgtcggcggaacgcaccaccgactggccgtgaccagacgagctcatcaccggcttgaccacgcacggatagccgacttccgaagctccggcgcgcagctcttccagcgagccggcaaaacgatacggtgtagtcggcaagcccaattcttcgtgggccagtacgcgcaggcgctcgcggtccatgcaaatcgcggcgatttcggcgctcggcaccacctgggcgcccgcggccgcagtaccggccagcacatcggtggcgatggcctctacctcgggcacgatgatgtccggcttgatttcatcgaacaatgcctgcaattcggcggcattcgccatatccaacgcgcgatattcatgcgccacctgctgggccggagcgccggcatacgagtcagcggcgcacacccacgcgcccagtcgcatgagctcgatggccacttccttgcccagctcaccagcgcccaaaaacagcacgcgggtggggtgcttgcccagcggtgtgcccagcgggcggttggctgcgcgagttgcgggggagacggcggaagtctcggcgggaattgcgggagaggaggtggaagtcacggcagtatttacggcgttctcagtcatacccacattctgccatgccgcgatgatttcgcctatgcggggctcggattcggcgacgtgcgctgcggagcgcgtgattcaatattgggcaaaatgcggcagcccataccatttcatacgcgttcaggcagcgcggccgacgccattgcagcgcggtggtttaggatgaggcaatgcgcgaaaacgggattgaagagagcattgatcgtccgctgactatcgctcttgtggtcgatacggtgggcaatcagggcaacggcacctccaattcggccttgcaatgggctgcagaattggagcggcaaggccatcatgtgaggcttgtcggtataggggcgcccgaatatccggcgcgcgtgaatagggtgccgctcgtctcgtgggtggccgccaagcagctcatgcaattcgccgaacccagcgacacgttgttccgcaccgcttttcaaggcgtggatgtggtgcatatctatatgccgttcaaattcggccgtcgtgccgctaaagtcgcccaccaaatgggcattcccgtgactgccggattccacctgcagccggagaacgtgctgtattcggccggccctctacgtcgcattcccggtatttccagcttcctgtactggctgttcaagcactggctgtacaagcacattgaccacatccatgtgcccaccgaaatgaccgcgagcctgttgcgcgcgcacgggtataaagccaagttgtacgtgatttccaatggttattcaccggtgtattcgccgaagaagccggccgatccggatgcctcggctcccgtgccgttccgcgtcatcgcttccggccgactggctagcgagaaagatcagattacgctgatcaaggcggtgtcgatgtcccggcacgccggcgatattcagctggtgatcgccggtactgggccgctcaagcagtatctcaagttccgcgccgggcgtttgctggcgcgcaaggccgatatcggattccacaagcacgccgatatgcccgatttgttgcgttcgggcgatttgttcgtgcattgttcgattgccgacatcgaatcggtgagcgtgatcgaggcgatggcgtgcggattggtgccggtgatcgccgcgtccgaactgtcggcggccagccagttcgcgctgatcgacgagtcgttgttccccgtgcgggacgcggccctgctggcccgacgcatcgattggtggatcgcacatcaggccgagcgcgccgaatggggcgaaaaatacgccgaatacaccaaggcgcattattccgtggaagcctcggtccacaagttcgtggatatggaacgcaaggcgataggggagtaggagccttctcgtttgcggagaggtctttccctcagtccgcctgcggcggccagctccctcatcagagggagctacgaaaaaacctccctctgatgagggaggtggcatcgcgaagcgatgacggagggagagattagcgaagggttttacaacaactcaataagctgatcgacctcttcatgcgtggtggcccagctggtgcagatgcgcatcacggtatgcgtgtcgtcggccttttcggtaaagccgagcttgacctcgcgctccagacggtcgatggtcggctgatccatcgtcacgaaaatctggttggtgggcgcctcgaaagtgagcgtgtagcccttgacgcgcagggcctcgcgaatacgatcggccgcctcattggcgttgcgggcgatcttgaaatacaggttgtcggtgaataaggcgtcaaactgcgcgcccagcacaaagcccttggctagcaaggcaccgtgctgcttgatgagggtcaagaagtgcttcggcgtgttgtgcttggtaaacaccacggcctcgccgaacagggcacccaccttggtgccgccgatgtagaacacgtcggcgatggtcgccagatccgcgagcgtcatgtcggaaccggtggcggtcagcgcgtagccgagtcgcgctccgtccacaaacagcggcatgtcgtacttgtgcgccacatcggcgatggcctgcaactcggccttggagtagatggtgccatattcggtgctttgcgagacgtacacggagcccgggaacaccatgtgctcgtagttgccgtccgcatagaaggtcttgcagaactcgtccagttcggtcgggtccattttgccgttgtgctggggaatcgtaagcaccttgtgcccggagaactcgatggcgccggcctcgtgcacgttcggatggccggaggcgaccgcgaccacgcctgcatacgccggggtgatggtgtcgatgacgacctggttggtctgcgtgccgccgacgaggaaccacacatccgcgtccggctggccgcaggcctcgcggatcttggccttggcctgatcgctcagttcgtcggacccgtagcccgaatacagatggttgttggcttcagccacggcttcaagcaccgcgggatgggcggcgcgggagtaatcgttctcaaaagacagcatgacggaccttttgtccttatgttcggtgaattggatatgccctgagtgtacaacgcggtggttcccggcatgcctatttggcctataacccaggagcggggaattcagggagaaaaaacaaaacccttccgcgaacggaagggttttagtggggtggccaacgcggctcgaacgcgcgaccttctgaaccacaatcagatgctctaccaactgagctatggccaccatagtgccgtattcagcaagctgaattcgcgcaacaggtgaatactatacacaactttgcggatgtgtgctcatcggtgtgtcgcgatggaatcaagtggtcggtttcattcttggggccaggctgcgggctgtctcagatggcgggatgtggatgagtgggtcttgtgcggcgattgatgaaaagtcaaggcacacgacggtgtgatggtacgaccggggattgcagaaatgattacgtgagtgttcgcaatgtgagcattatgtttcatatcaaccgcgacccgcctagtttcatgcgatgttacctacaccaaacaagggaagagaaacaccatggaaaaggttaaagcctttgcagattggctgaccaagtggtttacggtcatcgtcatcgtctgggccgtcttcaactacttcgtgccggccgccagcttgtggggcaaggcgtacaccggctacatgctgggcatcgtgctgttcggcatgggcctgaccctgacgctggacgacttcaagcgcatcctgacccagccgctgatggtcatcgtcggcaccgtagctcacttcatcatcatgccgctcatcgccgtggccctgtgcgcgatcttccacctgtccggcccgctggccgtgggcgtgattctcgtcggctgctgcccgtctggcacctcctccaacgtgatgagctacctgtcccgtggtgacgtggccctcgatgtctccatcggcatcctctccaccctgtgcgccccgttcatgattccgctgctgatgcagctgctcgcttctcagtacgtgtccgtgccgactcagtccctgttcctcaacgccgtcaaggtggtgctcttcccgatcgccctcggtgtgatctgccacatgatcttcggcaagaagatcgagaaggttacggtcgccctgcctatcgtttctcaggtggctattctgcttatcatcggcgtggtcgttgccgccaacggtccgaagctgttcgtggccagctccctggtggccatcccggtggtcatcctgcacaacctgtgcggctactcgctgggcttcggcttctccaagctgatgtacaagatctacccgaagggcttccgctacgcacagcagaaggccatcaccttcgaagtcggcatgcaggactccgctctgggcgcaaccctggccctgacctccttcgcaaccaacccactcgctgccgtgccgtccaccttcttctccgtgtggcacaacatctccggctctatcctgtccagctggtggcgcaaccacgatgacaagcacgagatccactgggattccgacaatggcgagaagggctctgccaagagcaccgtttcagcggcccacccgttcgacgccgataaggccgccaaggtcgctgcctgaaatcctgaaatggtgagaaaggtcgggtaaggcacgactccagtcagtcggtcatccacctttcctacctcgcataacatagccgctcccgcttactcccgattgaggtatcgggcgtttcgcgagggcggttttgctataattggtaatgcagaaagcggcaaggtaatacggcaaagaggccgggtcgctagaggttcccatcggatatggaagagcacgaggatgtgctggaaacagataacacagaagcggatgtggtgaaaagaaacataatgtaacctccttggcggtgcccccgtgtgacatagtctccgcgggggcacctgctgtgtggcgttccctttttgcgacgcattcccgggaatattgcgttgggagaatagttgggtgtgtgttttgcgacgcattggaatattgcgttgggaggagaggaaaagtacgggggcgcaggaggtccccaaaccagtgagttgtggctcggcgcgtcgttgtccggaggaatcgtaatatagatattcgtgtgtgccaacagcacgccttatgtaacaggcgagcatgctgggatatccttcaaaccgctgatcgcacgcagtaatgcgccgacgggaggggcgaaggccatcgggccggtggactgggctatcttttccgattcgtcgggtgccgccaacaggcggataccaagcgagtgtgctgaaaagtgtgggtgcagtgcggcggtcacacaaaagcaagagaaaccactgaatcggagaattcaagttgcctactattgaacagctcgtccgtaagggacgtcaggcaaagccgaagaagtccaagactttggccctgaagggcagcccgctgcgtcgcggcgtgtgcacccgtgtttacaccaccaccccgaagaagccgaactcggctctgcgtaaggttgctcgtgtgcgcctgtcctcgggcatcgaagtcaccgcctacattccgggcgaaggccacaatctgcaggagcactccatcgtgctcgtgcgcggcggccgtgtgaaggatctcccgggtgtgcgttaccacatcgtgcgtggcgcgctcgatacccagggtgtcaaggaccgtaagcagggtcgttccctgtatggagcaaagaaggcgaagtaagagatatgtcacgtaagggaccttccaagaagcacgtcgtgctgcccgatccgatctacggttccaccgtggtggcgcagctcatcaacaagattctgcttgacggcaagaagtcgatcgccgaagacatcgtctactccgcgctcgatatggtcaaggagaagtccgaccaggagccggtggctgtgctcaagcgcgccctggacaacatccgtccgtccctcgaggttcgctcccgccgtgtcggtggcgccacctaccaggtgccggtcgaggtcaagccgaaccgcgccaacaccctgtcgctgcgctggctgaccgatttctcccgcgcccgtcgtgagaagaccatggctgagcgtctcgccaacgagatcctggatgcctccaacggcctcggtgcttctgtcaagcgccgcgaggatactcataagatggcagaggctaacaaggccttcgctcattaccgctggtaatcactcgccctgagtaaaactaaggaaaaagatggctgaagagatttcggacctccacgacgtccgcaatatcggcatcatggcccacattgatgccggcaagaccaccactaccgagcgtattctgttctacaccggtaagaactacaagatcggcgagacccacgacggcgcctccaccatggacttcatggcgcaggagcaggaacgtggtatcaccatccagtccgctgctaccacctgcttctggagccgtcagtcccacgacaccaaggacaagttccagatcaacatcatcgatacccctggccacgtggacttcacggccgaggtggagcgctccctgcgtgtgctcgatggtgccgttgccgtgttcgacggcaaggaaggcgtggagcctcagtccgagaccgtgtggcgtcaggctgacaagtacggcgttccgcgtatctgcttcatcaacaagatggacaagctgggcgcgaacttctactactccgtcgacaccatcaaggagaagctgggcgctactccgatcgtgatgcagttgccgatcggttccgagaacgacttcactggcgttgtcgacctggttgagatgcaggcttacgtgtggaacggcaccgaggagctcggcgccaagtacgacaccactgagatcccggacgacctcaaggacaaggctcaggagtaccacgagaagctcgtggaagccgctgccgaagccgacgacgacctcatgaacaagttcttcgaggacggcgacctgtccaaggaagacatccgcgctggcgtgcgtaagctcaccatcgccaaggaagccttcccgatcttctgcggttccgccttcaaggacaagggcgttcagccgatgctggacggcgttgtcgattacctgccgtctcctgaagacgtgccggccatcaagggctacaagcctggcgatgagtccgtcgagatcgaccgtcacccggtcaagtccgatccgttcgcggctctggtcttcaagatctccacccacccgttctacggcaagctcgtgttcgtgcgcgtctactccggctccgttgtgccgggcgactccgtgctcgactccacccgcgagaagaaggaacgtatcggcaagatcttccagatgcacgccgataaggaaaacccgatggaccgcgctgacgccggtaacatctacaccttcgtgggcctgaagaacgtgaccaccggtgacaccctgtgcgccatcgacgatccgatcaccctcgactccatgaccttcccggatcctgtgatccaggtggccgtcgaaccgaagaccaaggccgaccaggagaagatgggcatcgccctgtccaagctggccgaagaggatccgaccttccaggtcacgaccgacgaagagtccggccagaccctgatctccggcatgggcgagctccagctcgacatcatcgtcgaccgtatgcgccgcgagttcaaggtcgagtgcaaccagggcaagccgcaggtcgcctaccgcgagaccatccgcaaggccgtcatggaccagggttacacccacaagaagcagactggtggttccggccagttcgcaaaggtcctgatgaacttcgagccgctcgataccaccgagggcaagaccttcgagttcgagaacaaggtcaccggcggccacatctccgccgaattcatcggccccatcgaggccggtgtcaaggaggccatggagtccggtgttctcgccggcttcccggtcgtgggcgtcaaggccaccgtcaccgacggccagatgcacccggtcgattcctccgaaatggccttcaagctcgcaggttccatgtgcttcaaggaagctgccccgaaggccaagccggtcattctcgaaccgatcatgaaggtcgaagtccgtacgccggaagagtacatgggcgaagtcatcggcgatttgaaccagcgccgtggcaacatccagtccatgaccgacggtgtcggcgtcaaggtcatcgacgccaaggtcccgctgtccgagatgttcggctacatcggcgacctgcgttccaagacccagggtcgtgccatgttcaccatggagatggactcctacgacgaggtgccgaagagcgtctccgaggagatcatcaaggcccagcgcggcgagtgacacgcgccactgcatgaagtagccagtgtcttcagtcagcggtaatatcgtataccgctgactgggttctggctcttcaaagtggcacataacccagaaacccagtagaataagcgagttcctgtgcgaaagggtgcaggaaactcacgagacgtccaggaggacaaaagtaatggcaaaggaaaagtacgagcgtactaagccgcacgttaacatcggtaccatcggccacgtcgaccacggtaagactaccctgactgccgccatctccaaggtgctgcacgaggagttcccggatgtcaacccggagtacgacttcaaccagatcgattccgctccggaagaggccgcccgcggtatcaccatcaacatcgcccacatcgagtaccagaccgagaagcgtcactacgctcacgtcgactgcccgggccacgccgacttcgtgaagaacatgattaccggtgctgcccagatggatggcgctatcctcgttgtggccgccaccgacggcccgatggcccagactcgcgagcacgtgctgctcgcccgtcaggttggcgttccgaagatcctcgtcgccctgaacaagtgcgacatggtcgacgatgaagagctcatcgagctcgtcgaagaagaggtccgcgacctcctcgacgagaacggcttcgaccgtgactgcccggtcatccacacctccgcttacggtgctctgcacgacgacgctccggaccacgagaagtgggtccagtccgttaaggacctcatggacgctgtcgacgactacatcccgaccccggttcacgacctggacaagccgttcctgatgccgatcgaggacgtcttcaccatctccggccgtggtaccgttgtcaccggtcgtgtcgagcgtggccagctggccgtcaacaccccggtcgagatcgttggtatccgtccgacccagcagaccaccgtcacctccatcgagaccttccacaagaccatggacgcctgcgaggctggcgacaacaccggtctgcttctgcgtggtctcggccgtgacgatgtcgagcgtggccaggttgtggccaagccgggctccgtcaccccgcacaccaagttcgagggcgaagtctacgtgctgaccaaggacgaaggcggccgtcactcgccgttcttctccaactaccgtccgcagttctacttccgcaccaccgacgtcaccggcgtcatcgagctgccggaaggcgtcgagatggttcagccgggcgaccacgctaccttcaccgttgagctgattcagcccatcgctatggaggaaggcctgaccttcgctgtgcgtgaaggtggccacaccgtcggctccggtcgtgtgaccaagatcctcgcctgattttcatcagacaagaatcttcgcttgaactagcgttataggaaatccccttcgaggaaactcggaggggattttctataaccgcagcaggatatggatatgtaccacgacttccggcctggatgcgctagtgttgcttttcaatagataaacggactgctgcactgcgaggatatgacactgatggcaggccgggaaagaaggtcgatgatgactggtgcacaggccgctcactgtggttctgtatccgcaatttcgctgggactgcccgtttccacggcgattcccgaagccaaaggcacactgccgaaagccttgttcgtaggcaaagcgccgatttccggcaaactcaagcagcgattggtgaacgagatcgaatccatcaccatgctggcgttggcccggtcggccaacacggggcttgcggacggcaaactgatcccggaagtgctggtcatcggactgaagcttacggccaaagccaccggcataccgaacgaagtcatcgacctgatcgccggacagcgcaaatcgggcatcgtgttcgtgtgcgtacgcgacgtgccgttcgagggcagcacgcgtgaggaatgcgcgttcgccgtgcgccgcgccataccggggcgtgccgggcacacgccgatctatcaggtatatgccggcgactggcagccggcgggggaggcccagctggagctggccggctctactattgatgagctgtgggcatcgctgtgctcacagaccattttgggtacgccggaggtcgagaatctggatgcgcgcatcattcgccatactgaaattgctcggctcgaatccgaagtggacaagctcactcgtgaccatcagcgcgtcaagaacccggcccagcgcaacgagatctatgccaaactccacaaggccaaggcgcagctcgcaaaactgcgcgaggcatagtgatgtgaaagccattgggcttccgctggcgggagctggctcgcgaagcgagactgagggtggtccaggtccgtggcctagggctacgcccaagctaattgaaatattcgtgcatcatacagcgtacagttaaaccatgttccctctgctcgaaaccctggtcgccgtatacgaggtgggtcagttcacgctggccgccgatgagctgaaggtatcgcagtcgacggtgacgtcgcgtatcgcccaattggagcagatggtcggcgcgccgctgttcgtgcgcaatgcgaaaagtgacgtgacgcccacacaggccgggcggatgctgtaccagactgccatcggcatcgacggattatggcgggatacgcgtgagcagatcgcccgcgtgcaggaggcgcgtgagccgctggccgtgtcgttctcgcacacgaccgcggcgattctgctgccgaaggcgttgccggtgatggctcgggacatggacggtttcgacttcgctgtacacgtgatgaactcggatgcgattctcgaacaggccagcatgaaggccgtgcagctcggcgtggtggaaaagccgatcgtgaacgattcggtggaccgcgtcaccctgtgcgaggaccggctggtgttggcgggggagcctgacggcgtgtggatggtgcgcgaacacggttccggcgtgcggtattacacggatctgtatttcaagaccgctcaggttgtgcctgcacgcacgatggaagtgtccagtaatgcggcgattgtggcggcgctgtccgccgggttcgggcagtcgttgatttcggaagccgccgtgccggcgggcgtgccggtgcagcgggagcttggcgatgagtttgtgcggcggttctatgcgctggtgccgagatccggtctgacgcacgatcagcgggagttggcggagacgattattgctgcgctgcgcgggtagtcagatagtcgactgaggggaggttgcgaacgttgtttctctccctccgtccgcctgcggcggccacctctctcatcagagggagatcaattaggtatcgacaaaatcgatgatatgtattggttgcaatgatttgaccgatgtaaacgcttgagcttcaatagacatcatgagagagttctgtacaaaatggtggaagcgcattgccaccgttgacatgctgttcattggtgttctgactctgctggcctcgctgttcgcctcctggctcaagcagttccccggattcagcctgttcggcgcgctcatcatcgcgctgctcatcggtatgatcatccagttcccgatccgcagtgcctacgtcggttccaatgatggccgcaaggcaggcgtcaaggacgccgctggcctgatttccaacaagctgctgcgcctcggcatcatcctgctcggtttcaagctcaacctcgccgtgctgttcacgcagggcatcaagtgtctgccgatcgccgctgtggtcgttacgctgaccatcatcgtgtgctatgccatcgcccgcaaactcggtgtcgacccgatgctcgccatcctgaccgccggtggcaccggcatctgcggtgcggccgccgtcatgggcctggccggttccatcaaggtgcctgaggacaagcaggacgagaaggacaacgacgtgaccatggccgtggccatcgtagccattatgggtactgtgttcgcgttgctggagatcgcgctcggcccgctgaccggcatgaccaaggaccagctgggcatcaccgccggtgcttccctgcacgaaatcgcccacgcggtcgcgggcggcgacgcgttcggcgcggtggacatcgccaccatcatgaagctttcccgcgtgctcatgcttgtgttcgcggccatcatcatcgccatctggtgggagaagaagcattccgaggttcagagcaccggcaagaagaccgtggccttcccgtggttcatgctcggcttcatcggcgcttcgattatcggcaccttcgtaccgttcgtcacctccatcaccccgcagctcgtggactttgcgtacatcgtgctcggcatggccatggccgcgctcggcatcaacgtgaacttcaaggccatcgcttccaagggcaagaagccgatgctcgccagcttcctgacatcgattctgctcatgtgcttcgctgcaggtgttgcgatgctgttcttctgataagcgctccaaatacaaataggcgaaggcgaacgacagtgagcaattggaatgtgtcacctaaaaatcacgtacttgcacaacggataaccccagccgaactggcaggccatcgcaatgaacttcaccacatatggactcagcccggtcgcacccggcatccagccgatcagcagcgtgctgaacgtgaagttccagatccacagcagcacgaacagcgccacggaacgggtgaagttgctggacgatttgaatgtcacgttgcggttcatcacgaagttgtaggtcgccgaacacaccacggcgatgccgttggcgatctgtgagggtacgccgatcaagtgcagaatggcgaacgtcgcatactccacaatggtctgcgtggcggaaacacccacatacttgcccagcacggcgagtccattttgcttcggggttgccgtgcccacggtattttccgcagtattcgttgtggtcgaggtatttgtggcgcccacaccttgattcggcttcacattcgctccattgttcgccatgcccatatacctcccggatgtacctgtgacgttcgacctcgcaatgataccgctgaccgcgtcgggaatcggcgtggcggtcagacgagaaaaccgcaggccgcagcaacgaccggcacacccagcgacagcaccagataggccgctgcggtggggtagcggtgtttgcggaagagcgtcaccatttcgttgattgcggtcgagaacgtggagaagccgccgaggaaaccggtggccagcactagccgccatggttcatcaagtgtcccgccgagtgccagcgccgcgaccaaaccggctaggaatccggcgatgagattgatggtgaacgtggaaagtgggaatgcgcgctgccagtacgttttgatggtcacgtcaagcagatagcggcaggaggcgcctacgccgccgcacaggcagaccaagattggtaggaatacggtcatcacgccttacctcccttgctggtcgtagcggcattcgtatcagcggacgcttcggcggatacgttcgaggagccggccagatgcgttcctgcccacacgccggcagacgcacaaaccagacccagcgcgaacgtcaccagtagataggcaatgccggccgccacctgaccgtcgcggattgcggtaaaaccttccagcgcgagtgtcgacatcgtagacaaaccaccgcatacgcccatgccgagtccgcgactggcaagttctttggaacgtgcgccgaaccgggaagcgccggccaagtaagcggtcaaccctgcatagcagaagcaagccagcatgttggccacaaacgtgccggtatggaagctgccagccgcgggaatctgtgcgaacgcatagcggatagcggtgccgatcgcaccgccgcagaagacgaccaacacaatatcaagatgaatatcggggagcttgcgcgccgggggagtggtcgtgtgcgtaatcggccgggcacctgcggatggggattgcgaatccataatagcctttcctgaaaccgctgaatcctgctgaagacacaacgattccatgcaatatcaaatcgtgtgtaggaactatcagcagtgtgcggttcgaaacgagttcaggcgggttccatcgccggttccttagcctactcgtggcggcgacaacaaacggcagcagtatctcggatattggcctatcgcggtggatttcggcaagagacttctgcaatgccgatgaacttggttgccgtgaggcgataaagcacgtagatgaattgcttggttgcttccatacctcgtgggtatggctcaacatggtttatggctattggctaatacagatcgattgtcgtttaatggaacatgaggataacgggccctaatcgctcggtgccggaaacaaggagttgtgaatatgtctgaaaccatgaaagccgcgattttcgttgagcctggcaagatgaccgtggaagaagtgccaaaggcggcacttcagcaggatgatgacatcgtgattcgcatgatgcgcacctgtgtatgcggctctgatttgtggttcttccgtgggctgagcggacaggccgcacacagtcaggtgggccacgaagccattggcgtggtcgaggagactggcgcggcggtcgaatccgttaagccaggtgatttcgtggtcgtgccattcccgtacagctgcggcaagtgcccggtatgcaaggccggcttcgaatccgtgtgcccgcacgggggctacttctccgcttgtcaggccgaatacctgcgtgtgcccgaggcggacggcaccgtggtcaaggtgcccggttcaccggaagattattccgatgaacagctcgcatcgctgctgaccatttccgatgtgatgtccaccggttatcacgcggcggtttctgccgaggtcaagcccggtgacacagccgtggtcatgggcgatggtgcagtcggcctgtgcggtgtgattgccgccaagatgcgtggtgccacgcgcattattgccatgagccgtcacgaggatcgcgcggcgctcgcccgcgaattcggtgcgactgatatcgtgcccgagcgtggccaagaggctattgacaaggtgctggagatgaccggtggctatggtgcggacgcggtgctcgaatgcgtgggctccaagcagtccttcgacacggcgattggcctgattcgccgcggtggcgtgattggtcgtgtgggtctgccgcacgacgtggagatcagcgccgaaggcacgttctacggcaacatcggcatcaagggcggcccggctcccgtgcgccactacgatattgacggtggtctgctggatgcggtgcttaaaggcgagattaaccctggccgcgtgttcaccgccgaatatgacctcgaccatattcaggacgcttatgaggccatggaccagcgcaaagttattaaggcgttgatccggttctaatcgcgtggtgtgacggggtttaccgcagtggtatttaacgtccgtatgtatgcgtcccctttgtagggccgcatacatacggacgttgtgatgtgtctgacgcggtttacgctgaacgattgtggtgacgcaaaccggtcacctgttactcggcgagcagtgccttgtactgtgcagcggactgggcgagggcctcgtcggtgatgccgaaagcgccgcacgtggcgaacggcttgagtcaggtcgcgccgatgtataagccgtgccctcgatcggaataagcagctgctcgatggggtagtggccggggtgccggtctggtaggccgattccggcgaaccggtggacactgcgcatcgcgtcgggaaccgtggccaaggcgtacaccgaactcgccgactgcggcatcatcgacaccggtgccggccgcgcggcgcgtgtaaaacgggtcaagccgattcccgaaccgctggtgcgcgcggccaagacctatgccgacgaggcccgccggcttggcgcgagcctcgatgacgccttcaacgccctgtgcgcgcagtggtaaagcgcgcaccgatgcgaagcctacacggggtgcaccgtcagcgaaaagtcgccgatggtgctgacggtcgagggtgaggccagattgcagacatctcgcaagcagtacgtggcatacagcggaagataggttgttccgccgtcctgcgcaatattggagcgggacagcaccacgccctgcgagatgcgatattcggcattggccaatacggcgtcgatggcggcgtgcgtgcggtagctgcgccccgacttgacctcgaacggcatcacagaatcggcgttcgtgtcagcgatgaaatcgacttcaccatgtttctttgccatgtagtaatacagcggaatgccttgcgccgtcagctcctgagcaatcacgttctcgtagatggcacccagattcggtgaggaatcatcaaggtatgcggcttgcgcggtcggttgcgggtatcgtgccatgagcataccggtatcagactggtacagtttgaacttcggtgattgcgccgtgcgtttcaatggtgttttcggctcggtgacgcagttggttttcaatgccacacccgcatcgacaagccaaagaaaatccttctgattgcggtcgtaccgagcaccggggctgatggaggagacggcgaatctgccgttaccgtcaatcagctgagtggggagctggtcgaagatctcctgcacctgcaatgcgcgattgcctgcgtactgcgaaatatcgtggcgatattgccggttcaactcgttctgcaccgcgtgcacagccgccaaatcacccttggtgtccagaaaacgttgcacgacttccggcatgccgccgactaccagataggtgcggaagttcgtcatcattgcatcgtgaatgtaccggtcgattggcgtgaccgaccggcaggattctcggatgttttcaagtgtcgacttctgtacgccgatggcccaacagaattcctcaaaatccatgggacgcatggttttttcgatgaccgagccaacggggtaggagcgtacgcccttgaactcagtgccgagcatggaaccggagaacacataatcgaaacggccatcggccaccagaaacttgaccatggtcatcacatccggtgcctcttgcacctcgtcgatgaaaatcaacgtatcaccgggaatgagcgttgaaggtgagaacaaggtaaggcggctgatgaactcctgcacgtcgttcgccgatgcgagcgctcgggccgcctgcttgttctcgtacaggttgatttcaaggtaatgggcgtattcgtgcttggcgaactcgcgtaccgcgtagctcttgccgatctggcgagcgccggtcagcagcagtgctttgccggtaccgctccgcttccattccagcagatcgtccgagattttgcgctcaagcatggcagctcctttccgaatcccttatgagggtagcattttccgccttgtatgtgcaaaatgccgcatttcaaaatggggctttggtgcaaaatgccgcattttaaagtagggttttggtgcaaaatgtcgtgtaaatggtgaattggacgtgcttgtaaggggagctggatgatcgtgcggctggatgaccttgtaactaaatgattgaacgattgcgcggccgtcgtttgcgtggccgcaaagttgtgtgggctgttcgcgaattatgcgcggtcggccgtcatgtgcctgcgcttggggtgctcgataagtagcgctcgcttcttggcgtcctcggcggtcgaagccggtacgccgtcggaggaggcgtcgatgatgcgctgcaggtagccgtatagggtgtgcagctcgtcgtcattcagacagtccagcatagaggggcctgatcaaaaccagttcacgaggtcctttttgctttaatccccgctgagagcgcgtagcgccggaggatgatcggatgccgcgacgccgaatcaagattcagccgctcgccgaccagcccgaccagcaaggaaccggattcgcgcatcggcggcatgcgcgctgctattcgcgctgaaacagcatggcatgggtgcgctgacaccgcgccggcgcaaaggccatcagtgaaactggggaatcggattgcaggtggcggacggtgcccaagacgaaagattctcgtccggcgttcagccgctgtcgttggccgtgatgatactggagaccatgaaactcaggcggcggcagccaagggcgaagtcgagaaagaggtgacggcgtgacacttgaacagaggtcagatagcgcggcggcaggccacgaggcatgtgaccagccgatcaggagcctggaaatcctcaaccaatgcgttccgctgttcgagacgctgaaggatccgaaccggcagcagttgctggtgcaattggtgtgccatgggccgcagacggtgggggagctggccgaatcgtcggcactgtcccgcacggccgtgtcccatcacatcaaactgctggaacaagccggattcatcgaaatcagcaaagacgccacccgccgcatttgctcggtgcgtgcggatcgatggctgccgctgctcgatgaactgtcttccgccctgaaagccgaccttgcggcggcggagcagtgccgagcatgagcgacgatcaacggccgcaggcgattgaggtgcgcggtgcgcgcgtgcataacctcaagaacatcgacatcgacattccgctgggcgaactggtgggcgtggccggcgtctccggttcgggcaaaagctctctggcgctcggcgtgctgtatgcggaaggttcgcggcgctacttggaagcgctgtccacgtacacgcgccgtcgactgactcaagccagccgcgcccaggtggacgaagtgctgcatgtgccggccgcgctggccctgcaccagcggcccactgtgcccggcatccgttcgacgttcggcacgatgaccgaattgctcaacagcctgcgactcctgttttcccgcgtcgcctcgcacgtgtgcccgcattgcggggcgcgcaatgaaccgacgctgaacgtggcggccggcctgcccatcacctgtgctggctgcggcaaggaattccacgcgcccggcgccgaattgctcgccttcaactcggccggcgcctgcccgacctgctccggcaccggcatcgtgcgcgaagtaaaccgcgcggccctggtcccggacgagtcgaaaagcatcgacgacggcgcggtgctgccatggggttcgctcatgtgggacctcatgaaacaggtgtgcggcgcgatgggcgtgcgcaccaacgtgccgttcaacgaactcacacccgaagaacgcgacatcgtattcaacgggccggccgtcaaaaagcatattctttacaagccgaagaaaggcgacgatttcgccgaactcgacttcacctacttcaacgccgtgtacacggtggagaacgcgctcgccaaagccaaggacgagaagggcctgaagcgtgtggtccggttcctcaaggaaggcccatgcgccgactgcggcggcacacgactgagcgtcgccgcccgggccccgcatgtgcgcgggctgaacttggccgaagccggcgcgatgaccttggacgcggcggcggattgggtgcgcggagtgccggaatccctgcccgccgacatgcggccgatggccgccaacatctgcgaatcgttcctggatgtggcccgacggctgctcgatctgggcctcggctatctggcgcttgaccgcgccggcgccacgctttcgaccggcgaacgccagcgtgtgcagctcgcccgggccgtgcgtaaccgcaccaccggcgtgctgtatgtgctcgacgagccatccatcggccttcatccctcgaacgtggacgggctgctcggcgtgatgcacgacttggtggcggacggcaattccgtggtggtcgtggaccatgatgtgcgtgtactcaaagcgtgtgaccatcttatcgaaatggggccggttgccggtgccgaaggcgggcatgtggtcacgcaaggcacggtcggcgaggtggcggcgaaccccagtagtcgcattgcgccgttcctatccgaccaggtgagtgcgcgtatacgtgagcgtgtggccgaatcgcaagtgttcagccttggccacatccgcatgacaaccagtcagctgcatacggtcaaaccgttggacgttgatatcccgcgcggccggctcgtggcggtgaccggcgtctccggctccggcaaaaccacgatggtactcgaatcgctgattcccgcactcaaagcgcaggcggcgggggagctgttgccggaacacgtgcgcgagcttgagaccgagggcatccgtcgtgcgaatctcatcgatgccacgccgatcggcgcgaacgtgcgctccaccgtggccacttatgccgatattcacgacgaattgcgccgcgccttcgcccgcacggacgacgccaaggcgggcggctggaaggctggcgatttctcgtacaacaccggccgactgcgttgccctacgtgcgacggcaccggttcgatctcgctcgacgtgcagttcctgccggacgttaccatcgaatgcccggattgcggcggatcccggtatgcgcccgaagccggcgcgattcggcgtgccgttaagggagaatcgcacctttcgttgagtctgccgcagctgatggcgatgagcgtggaccaggcgctgtccgtgaccggcgacctcaagaaggtccacgcgcgtctgaccaccctgcacgatctgggtctcgactacctgacgctcggcgaaccgaccccggcgctttcgggcggcgaagcccagcggctgaaactcgccagcgaaatgggcaaggcccagtcggacgcggtattcgtgttcgacgagccgaccatcggcctccatccgctcgacgttcgcgtgctgctgggcgtgttcgacaggctcgtggcgagcggcgcaaccgtcgtggtcatcgaacatgaccttgacgtgatcgccaatgcggactggatcatcgacatgggaccgggcggcggcgaaagcggcggacacatcgtcgccaccggaacgccggaacaaatcgcggccaatccgaacagcatcaccgggcggtatctgcgttgacttgtatggcggtcacgcgcctttgcataggaccctgcgcgagtaggatagccgtccatggtgcagattcatggcattagacgcgcgaacgcggacgcgaaatatcggcagatgaccgggcagccggtcaagccgctgatcctcaaactgtgcttgccggccgtcatctccaacttggtgaccaccgcatacaacctcacggatacgttctttattggccagctcggcaccgcgcagtccggtgctatcggcatcgcgttctccatcatgaccgtgatgcaggcgctcggcttcttcttcggcaacggcgcgggcaactcgatgagccgcgaactcggcaaacagaacaatgagcgcgcctcccgactactggccgtgggcttcgcgggcgcggtgctctctggtttggtgattgccgcaatcggattgctgaccctgcggccgctggtcgtcatgctgggatcgacctcgacgatcgccccatacgccgtgcaatacctgacgccgttgttggtcgccgcaccctgtgtatgcgggtcgttcgcgctcaacggactgctgcgataccaagggcaatcggcgttcggcatgatcgggctggtttcgggcgcattgctgaatttcctgctcgcgccgttgtttatcttcgtgctgcacctcggaatttttggtgccggcctggccaccgccatctgccagacggtgagcttcacgattctgaccacgatgagccgcaaattcggcgtaatgaagctgtccttgcgcaattgcaggccggatgtgctgctcatgcgcgaagtggccggcggcggcctgccttcgctgattcgccaaggtgccggctcgatctccgtgacctgtgtgaacatcgccgccaacccgttcggcgatgcggccatcgccggcatggccattgtgatgcgtatcatgttgggcgccaattcggtgatcgtgggcctcggccaaggtttccagccggtgtgcggatacaactacggggccggcctgttcgcgcgagtcaaagagggatattggttctgcgtgcggctcgccacctgcgtgctcgtggcgttggcagcgctgctgtggattttcgcgccgcaactggtcgagatcttccgttccgacccggccgtggtggcggtgggcgtggcagcgctgcatattcaatgctgcacggtgattctcaatggcttcaacatgatgggcaatatgatgacccagaccatgggccgcaccggcatcgcctcgttcctggccctgtgccgacaaggtctgtttttggcaccgatcgtactgattctgccgatgatgttcggcgtgctcggcgtggaaatggcacaatcggtgtccgacgtgctgacattcctagtcactatcccgttcatgcggcgaatcctgcatgaattgcggtgaatggtagattgcaactatgaataatcgaagtgcaaagcgggtgccgggcgttccttctcccgcgtatatcgaatcgctgtaccgcaccatggctgccgcccttggcccgaccggatggtggccggctgaaaccacattcgagattatggtgggcgcggtgctgacgcagaatacggcgtggggcaatgtgaatcgttcgcttgcggcgttgaacgcggagggtgtgctcgaaccccataagctggcgattatggggccagcgcatctgcaggaacttattcgcccgtccggcttttatgtcaacaaatccaagacggtacagtcactgagccgatggtatgtggagcgttgcggagcctcacctgagggcgcggcagatattcccgacgccgaattgcggaccgaattgctcggattatttggtatcgggggcgaaacggccgacgacctgatgctatatgtgttttcgcgccgcacattcgtggccgatacttatgctcgccgactattcgccttcctcggatttgatgtgccagccggctatctggcattccacaaggcctattcgcccgtggtgctggatacgagcctcagtgtcaaggatttgcaggaattccatgggctcattgacgagttcggcaaggcctaccgcgacgacgcggccaaaagcgagtcctttttgggtggatggagggcttgactgcacggcgaatcgttctcaataagaaaagtgtgaggcccgcacggtgccaatcgcacatctgaatccttgactggctgcgctcgatgctgggtgtcgaaaacgagtctgtgacagaatagttcgaccgacgcaatcgccaaaacgccgaacaggagccaatgatgaccgaaggcaagccgatcgccaagccgatgatcgatgatgcaacccgcgagaaaatggcgctcatgttctccggcgaagtctatctgccggacgatgtggacggctttttcgatctgcaggccgcccagcgtgacctccagctcgaactcaacgccacgccgctgaccaacccgaagcgctgtaccgaactcatgcaggcgttcttcggcgcggcgggggagggtctgtaccttgaatgcccggtgtatgcgaactggggctgcaatacgtactggggcgaacgctgctacgccaacttcaacctgaccctggtcgatgatgatgaaatcttcatcggctcccacaccatgattggccccaacgtcacgctcgtggccaccggccatcccgtgcgcccggacctgcgctaccggggcgcccagtattcgctgccgatccacattggcgaaaacgtctggatcggcgcgaacgtgaccgtgctgcccggagtcaccatcggagacaacgcggtcatcggcgccaactcgctggtcaccaaggacatccccgccaacacggtcgcctacggcagcccgtgcaaggtgattcgcgatatcaacgaacacgacgacgtctactactggcgcgaccgccaattcagcgaccgcttcaagatcaaggagcagtaacgcgaaagcttactcccacacgtcgagcttgcgatttttgtagaaatactcgcggtccttgtcgccgatttcgcgcacgacctcgcagggcgcgccgtaggcgaccgagctggcggggatggaatgcgtcgcgaccgaaccggcgccaatcacgcaattgtcgccgatggtcactcccggcagaatcgacacgttcgcgccgacccacacgttgcgcccgatggtcaccggaatgcaatatacgtagtggtgctcgcgcagcaccggcaacacggggtggccggcggctcattagcacggggaacggttgaacgagaagtggattggcatgtggtggtatcgaacatactgatgcgtgtgccgccgagcctgtccagatggctgcctatatgaaccagtgacagaagagcacgggaacgcgagcgagaggagcgtgcatggggcagttcggcgtcatgattggccagttggtcggattcctgatcatgctgatggtcgggtatggatgtgtgaggcttcgattctacggtcagacggcgttggacggcatgtgctcgttgctgctcaacgtgctcatccccgtgctcgtgttctcgaacgccgtcgacggcgcggaccgcgcgcagctcgccgccaactggggcgtgatgctgctgaccgccgtgatgtacgcgctgctcatcctggtgttctggctggtcgccaaactgttgcggctcaagggctcacgcagccacgtgttccaggcggcgctgattttcggcaacgccggattcatcggcattccgttgattatggcactttggccgcagaacggcgcgatttacgtggcgctgatgtcgatcatcgaccagacgctgctctggacgtacggcgtatggctgtgcgagccggtcgccgaaacgactggcggcaacgcgattggcgcgcgaggtgcggtcgcgaacggttcggtgaacggcaccggttcggtgggggaggctgcgaacagcggttctccggccgtcgcccgccccacgctagacacccgcgtcctcggcctgcttaaacgattcgtcaatcccgccttcatcggtgtgatgctcgccctgattctgattctgctcggcgtcaaggtgccggacatcatcctgaagccgctgcacaccatcggcaatatggccacgccgatgtcgctaatctacttgggcggcctgttcgcactgaccaagtggtggggcgtcctcaaacgctacgaactctatgttggcctagtcgccaagatgatcgcattcccgctcgccttctacgcgctactgaccgcgctgaccggcgcattgccgcaactgccgatcacccatgacatggtgctgatgattacggtcatcgccggactgccgaccatgaccaccattgccatgttcaccggtcgcaagaacaacatgcccgagtatgcggtcggcttcgtgctcgtaagcacgctgttctcgctggcctccttgacgattgtgtcggcagttgtgttctgaattgtccccttcgacgaaaagaatgccggggcctccggcgcttggaatttcatcgacgccgccaacgactccaatccgaggcggccgtgccgtatttcaaggagatattcgattacgcgcgcacgctcgatccgcagcatcgcccgctgacctacaccaatctgctgatggccgccggaggcaaagacaagtgccatcagttcgcggatgtcatctgcctgaaccggtattacggctggtatgtgcaagatgggtatcagctcatcggagccaagaaggccttcatcaacgagatgaaccaatggatgaacaccgaacccaacaagccgtttctgttcaccgaatacggtgcggacaccgatgccggtgtgcacaagctgccgagcatgcaatggagtgaagagtaccaatgcgagtacctcaccatgcagcacgaagtgttcgacatgttcgaggcagtggtgggcgagcaggtatggaacctctgcgacttccaaaccggtgaaggtatcatgcgcgtcgacggcaacaagaaggacgtcttcactcgcgaccgtcagcccaaagccgccgcctatgtactcaaggagcgttgggagactaagtagcggcccgcagctggaatattccagaagcaacacacatcgcataacacacaacacaacacacaaaaaaagaacctcgtgaaacgaatttcacgaggttctttctagttacgctgaatgactcccattagactcccacaagagaagagcaatggcggaactccaacgttgctaagctctcaaactcagatgtggaagtagagctcgtactcgagcggggtcggagacaggcgagcctggtcgatctcgtcgcgcttgaggccaatccaggtctcgatcaggtcgtcggtgaacacgtcgccggcggtgaggaagtcgtggtcctcttccagggcgtccatagcctcagccagggagctcggcacctgcttgatgccagcgtgctcttccggcggcagctcgtagaggtccttgtcgaccggctccggaggctcgatgtggttcaggatgccgtccaggccagccatcagctgagcggagaaggccaagaacgggttgcaggacggatccggagcgcggaactcgatgcgcttggcagccggggaggtgccggccagcggaatacggatggcggcagaacggttacgagcggagtacaccaggttgaccggagcctcgaagcccggaaccagacggtggtaggagttcagggacgggttggtgaaggccagcacggaggaggagtgcttgatcagaccgccgatgtaccagcgagccagatcggacaggccagcgtagcccttctcgtcgtagaacagcggcttgccgtccttccacagggactggtggcagtgcataccagtgccgttgtcgccggcgatcggcttcggcatgaaggtcgcagccttgccggccagagcggcggtctcgtggacgacgtacttgtacttcatcaggtcatcgcctgcgtgctgcagggtgttgaagcggtagttgatctcctgctgaccagcgccggccacctcgtggtgggaacgctcgagaatcaggccgaccttctgcaggttggcgaccatatcgtcgcgcagatcctgagtgtggtcaatcggcggaaccgggaagtagcccttcttgacgcggttcttgaaaccgatgttcggggtgccgtcttcctcaacgtcaacaccggagttccacggagcttcgatggagtcgacctcgtagaaggagcggttcatgccgttctcgaaacgcaccttgtcgaagatgaagaactcggcctcaggagcgaaggaggcggtgtcggcgataccggtggacttcaggtaagcctcggccttgccggcaacctgacgcgggtcacgggagtacggctcgtcggtcagcgggtcgacgatggagaaggccacgtcaagggtcttgtgcttgcggaacgggtcaacgaaagcggtctcaacgtccgggaccagcttcatgtcggactcgttgatggcctggaagccctgaacggaggaaccatcgaacggcatgccgtcggtgaaagcgtccttcaggaattcgctagccggcacggtgaagtgctgctgaacgccgataagatcggtgaaacggacggagacatactcgatgccttccttgttgataagggcctcggcgtcttccttggacttgagttcggtcacgggaccgctcctttcgtatgaaatataacggtatctatcgtaaaatcgcgcgtttcgccggctcgaaacttgggttacgagaatgtttcgtgactgtggccgacaatcgcgcaggcgcgttatttcaacgaaacatcattacagaatggaaacggaggctatcgggggagtgggtagaggtgtccgcaacgtggacagtggatattgacaggtgacgtaggtggatgtatgtggacgcgattatgagacatatgacgaagccccggaaccgattgaacggattccggggcttctgtgcgatttggtggtgtgctgccgatcagcgaccgcgcatcgcgcggcgggagatcttctgcgggtggttcgggtccatgcccttggggatggcataacccttcttggcctgcagcgtgcgcagacgatcgttcagcgtttccatctcggccttggtcagcaggaagcgacgacgcggatgaatcttggcgatcagtgcgttcttgtggttcgtgggctcatagctcttggacttggtcaccgtgctacgcagcttgtccagtggcacctgcttggggccgtggcccacggagatgcggtacaccggaatggaggagccggcggtgacgcccttgatatcgtgttcctgacgatccatcgccttcatgatgcgaccgtattcgccttcgccgatcaggtagatgccgttcatcgaagtgccgcgccagatggcatccttggtcttcgggtcgatccacaccggttcctgcgggaagttaaagccggctttctgcatgttgctcagcacgccgatggcggcaccaggcttgccgtcaatctgcttgtagccgactgcatccgcgcggcgggtgagcatcatggtggccagtagcatgccgagcatgatggcggtgatcatggtgaagatccaggtgagccaggtccacttggcaatcagaccgatgatgatcatcacgactacaggcagcaggaaagcaccggcctcaagccacggcagggccttgtcttccttagccgtgtacttgtagatctggatgatctgcttgattgtgctctgcttcttcggcttcgcgtccttttccgccatcacttcttcctttgttgggacgaaacacactagacaacatcctatcaggtgcgctggtccgaacttgtttgcccgatgtctatttagaagtgcaacacccttgttggtcctgtaattctaacagttcgtcggcgaacgcctcggcgggcgtgcggtagccgagcacgcgcatggggcggttgttgatctcgtcgacgatctccctgacctcctttgccatgtccatccggatctcgcagcgtttgggcagataccggcggatcatgccgttgcggttctcgttgcttccccgctgccagctggagtacgggtcggcgaagtacgtggccatgcccagcccgtcgcgcagcctttcgtggtgggcgaactcggtgccgttgtcgtgcgtgacgctgacgcgcgcgccggccggcagcggcgagaacatgtccagctgcgccccgacgctctcgccggcggtcttgtccggaacgatgcgggccatgaggaacctggtccttctctccacctcggtgtgcaggttgcatcccactccgatgacgctgtcggcctcccaatggccgaacgcgctcctgccgtcggcctccggcgggcgttcggagatgggcactcggccggggatcgggaagcgcgacgtcctcctgccgccgtgcctgcggcgccgcctgtgccctcgcggcaggcaccgcgcccagcgttcccgaagcggcctgctggagtagacccatcggtagatggtctccgggcacacgcgcatgagcgcatcgtccggccacaggacgcgcagcctgccgctgatgagcagcggcgaccagccgcggcccagccattcggccacctgcgcccacaggcggtcgtgcgacagccggtagggctttcgtggcttggatctcctgcggtcggccttgcgctgcgcgggcccggcgatgtagtagcggccggtccatggccccgccttcagtcttttcggccggtacgggcggtacgactcgttctcgttggacgggaaccatgtgttgcgcttgatctcccggctgatgctggacgggctgcggcccagcatcgcgccgatcccgcgtatgctggcgccgttgcctacctcgatctggatgacctggcgttcctcttccgacaggtgcgaatatacttctcccataggtgcgacatcccttcggactggttttctaggcaatttccaatctaacgggtgttgcactttcatttagacaacgggttgtgctggttggtctcagcgtgtgtgtaacggccgtccgtcggccttgagcagcgcctcgccgagcgtttcactgaacgtgggatgcgggtgaacgaggcgggctgcgtcggcgagcggcacatggttgccgaccagctgttcggcttcggcgatgatgtcggaggccatctgggagaccatgtgcacgccgagcacgcgcggggtgtccgggttggccgcgtcgcagccggagacgatggtcagtgaaccggccgtgccgctcatcagcatgcgcgcgttcgccagcatcggatagttggtctccttgatttcaatgagatcctctctcgcctgcgcctgttcgacggtgagcccgaccgacgccgcttcggggaaggagaacacgatttgcggcacggtggcttcgtccaccggcttgggattgagtccggcgatggtctccgcgatgacgatgccttgctcaaaagcacgatgtgccagcgcgtgaccggccgtcacatcgcccaccgcccatacgcccggtttgtcggtgcggccgtacgcatccgtggcgacatgtccgtggtcgtcaatcgtcacgccccatgctgggtcggtgatcgggtcacgcccgatggcgacaagggcgatttcgccccagacgctttgttcgccgtcctggccttcgcacgtgtagtgcacggtggcaccaaggttcgcgccggtgtccacatgggtgacgctggcgcgggtgatgatgttcacgccatgacgtttgagctcacgggtcagcgtggtgccggctctccggtcccaggctgagagcacacggtccttgcgaatcagcaaggtcaccttcgaaccggcggcgttccacatcgaggcgaattcaagggcgatggccccggcgccgataatcaccgccgacgagggaaattcgttgacttccagcgcctgtgtggagtcgatgagggcgccggcgaacgggttgccgggcaatgggcgtggcttggcaccggtggcgatgacgatgttcgtggccgtgaggtccatcgtggggccgctgggctcggggacatcggccttgtgataggtgaggatgtcgctttggtcgggggaagggacgaggtggacgatgtggttggaagttgctggagcggtctcatccgcatggaacgcggcattggctcggaacacggtgatgccgcgatgggcaagcagtccggccagtcctcccaccatcgtcttgaccacgcgcaggcgatagtcgcgcagcgtgccgaagtcgatgccattcaccgaggcgttgacgccgagctcggccgcacggtgcacggtgtcgatggtgtgggtggcggtgatgagcgccttggaggggatgcagccacggttgagacatgtgccgcctacggtggcgtcacgctcgacgagtgccactttcatgccgagttcggcggcgcgcaaggccgtggaatagccgccggggccggccccgatgatgaccagatcaaactgttcgctcatgattgcctccttgatacatataagtatggctcccacgctagggagccatatgcggctatcgccgccacttcgcctaaaaacagtccactggactgttttctttacggctcagcccctcaacgaggggagccagagtatatatggacaatcagtccgccggccagtgaccgcgcttcgggtaacgcggcttgggaagcctccaacgacgcatctgaatcgaacggctccaagcgtaggagaaggagcgggagcccttggacacggaccgttcgccgtacttggcgatgagcttggccttgagcttgcgccacatcagccatacgtcgatgatcacggcaatcaggtaaccgtacataagcgccatcatgatgatggaagcccactggttctgcatcaaagaagtgacgaacatggagacgatcagaatcgcgaaggccaccgggatgaaccattcaccaaggttgaaacgggcatccacataatcacggatgtagatacgccaaggcaagcgttccgccttgggcatgtggttgatatcgcccttctgcatcgcctcgtactcggcgttctccttctcacgcagacgggctttggcggccttggcgctggccctgcggtccaccggaaccagcggacggataccggcggcctgagcctgcttcatcttcggggtaggacggccttttttctcagaaggattggcggccttcttcggggcctgctcaacaggagcctggacctcttcttttttcttaaacggattccatgtcatgctttgaggttacggtgacgttcagacacttgtacactggcgcagccattgcaatgacgccgctcacacatatatataaaggaggaccatcatgacaacgctcaccgctgacgagattcgttcgcgcgtcgaaaccgattggaaccgcatcgtcaaggtactggccgaaaaggtcgcgctgcagtcgatctccgccaagggcatcaccgccgaacaaatgaagcgctccgctgaattcgtggcagacgaactgcgcctcgtgggtgtggataccaaggtggttcaggcttccaatgccgacggcactccgggcgcatgggaggtcatcggctcgcatatcgtttctccggacgccctcaccgtgctgctctacgcccatcacgacgtgcagcctgttccggacccggccgagtggaacaccgacccgttcgtggccaccgaaattgacggccgcctctacggccgtggctccgccgatgacggcggcggtatcgccatccattccggtgcactgaaggccctgggcgacgacctcaacgtcaatatcaaagtgttcatcgaaggcgaagaggagatgggctcgccaagcttcattcccttcatcgaggctcaccgcgacgaattcgccgctgacgtgattatcgtggccgattccggcaactggtcggcggacattccttctttgaccacctcgctgcgcggcaacacctgtgtggacgtgaccgtgcagggccttgagcatccggtgcactccggccagtacggcggcccgattctcgactccaatacgttggccgccatgctcatcgcttccatgtatgacgagaacggcgatctggccgtacccggcgtggccgcggaagagccgatcggcggtttgcagcacgaccttgacgaaaccaccgtgcgcaaggattctggcgtggtggccggttacgagttcgccggcaccggttcactggcctcacgcctgtggaccaagccgtccgtgaccgtgatcggcttcgacgcccacccggtcgagggatccttcaacgtgatcgccccggagacccgcttccgtctgtcgctgcgcaccgcgcccacccagcgccctgaagaagcgcaggaagcactggctgcattcctcgaatcccacgcgccgttcggtgccaaggtcactgtcgaacgcggcgaaaacggcatgggctgggccatggacccgaccgccgtggccaccaaggacgcgctggaagccatgaccgaggccttcggcgttgagcccatcaacaagggcgaaggcggctccattccgttcatccccgaactgcagcgcattttccccaacgctcaggtgctggtcaccggtcccgaagacccgaaggccaacgcccacagccccaatgagtccatctccctgcccggcctcaagaacaacgtgatcaccgaggctttgctgctggacaagctcggcaagtagccgaaccgcatcggtaatggtagtgagccgccgtcaggtaggtcacagatgtggctattgcctttgacggcggcttgctttatagtcgggagttgacacgggagctgccgttgggcggctgagaggagactcatagtctcgaccgatggaacgtgaccggataatgccggcgcacggaaatgtcgctcttacctacccgtgcctgaaccaacccgcgcgtggccacgaacatatgcatcatgtgcgtacatatatccacgtatgttcggcctgcgtgcgagcagaagaaaggcacattcatgactgaagctgtggccaaagccaattacaagtggcgcgtcgtcgatatcgtcgtcgccgcaatcatcgccgtcgcatccggcgtcattttctggggctgggacattgtctgctccgccccgctggccctgtttgaaggcgtgacccccggtttcgagggtctgctcaacggattctggctgttcgctggcccgctcgctgcaatcattgtgcgcaagcccggtgccgcactgtttgccgaaaccctcgccgccttccttgagcttacgctgggcaaccagtggggcgtcggcggctcgctgatcgtcggcatcatccagggtctgggtgccgaaattgccttcgccgtcttcgcttggaagaagtggaacatcggcaccaccatcctgtccggtgcgctcgccggcgtgggctgctgggcctactactgggccaccaacccgggctggaacggcctgcgcgtcacttggtatctggtgggctccatcatctccggcgtcgtgatcgccggcgtggtggtctggtacttgtctcgtgcgctcgccgtcaccggtgctctggagcgttttgaatccggccgcagcaaggcgcgcgtctgatgcagattaatccggctgcggtagaggccagcggctggggatggcggcacgccacgcgtaaggacttcgcgttgcgtgccgtcgatttcaccatccggccaggtgaacgtgtgttgctgctcggtgcttcgggcgcgggcaaaagcacgatgatggccggtctcgcaggcgtacttggcggcgatgaggaaggcgagcaggagggctcgctcaccatcgatggcgtcgatgcgcgcgaggcgcgaggtcgcgtgggactggtgcttcaggacccggactcgcagatcattcttgaacgactgggcgatgacgcggccttcggctgcgaaaacctcaacgtgccgcgcgaggagatttggcagcgagtgcgcgaatcattggatatggtgggactcggcggactcgaactggatcggtccacccgccatctgtccggcggtcagcgtcaacgtctcgcgttggccggcgtgctggctatgaagcccggtctgctgttgttggacgaaccgaccgccaacctcgatcccgaaggcgtggtcgaagtgcatgacgcggtcaaaaaggtcatcgaggccaccggacagaccatggttgtggtcgaacatcatatcgatgtatggctcgatctggtcgatcgcgtgattgtgctcggccgacccgatgcaagttcgcccacgggtgcggtcattgccgacggcaagccggacgaggtgttcgccgagatgggcgacgtgttggccgccggtggcgcgtgggtgccgggccgtgcgattcccgattactcaccgaagcaggagtctgcgcacgatgcgccggtgctcagcaccgagaacttaagctttggccgtggggccgctcttggcgttggtatcaatctggatttttatcccggcgaagtaacggctctgatgggtccgaacggcgcgggcaaatcgaccttggccttgaccttggccgggctactcaaacctatcgccggcaaggtgctcatcgccgacaacctcaagcccgcgcatgccgggcgtgagccgatcgactggaaaagcaaggaactgctgggccgtatcggcatggtgttccaggagcccgaacaccagttcgctgccaactttgtgcgtgacgaggtatccatcggccccaagtcgatggggcagagccaagacgaggcttatcagaccgccgaccgcatgcttgagcagatgaatctcacgcgcttcgccaaagccaacccgtacaccttgtctggcggggagaagcggcgactgtccgtggcctccatgctggccgccgcacccaaagtgttggtgatggacgagccgacattcggacaggatttcagtacgtggaatgaaatggtcaagctgatcgccgccatccgcgaccaaggctcgtgcgtgatcatggtgacgcacgatgaggcgctggtggatgcgctgggcgcacgacgtgtgatgttcgaggaggcgaaggcatgagtgacgtggtaaccgtcagcccgcaggaaacgcgcgtggagccggtcaaagcctcatcgccctcatggttcatcgcgcgcatcaacgcggtcagtcgcatcatcggtgcgctgttgctgtgcattccgatgttcatcagtctggatgcggtatccgcatccacggcgctcggcatcgaattcgtgctgctgtggattggtggcgtggctccgtggaccgtatgccgtaagacctggccggtatggatcgccgccgccggcagttttatctccgtgttcctctacggccgcacctcgggcgagatcctgtggcagggtggctggattgtgatcagcgagggatccatcaatctggccatcgccacggctatcagggtggcggccattgccgtacccggcgtgattctggccttgggcctcgatcccactgatttggcggacggtctggttgagattctgcacttctcaccgcgattcgtatacggcggattggccggattgcgcatgtttacgctgctgcaggaagattggcgcgcactcggcttgtcccagcgttcgcgcggccttggtgacggtaacgccatcgcccgtgccctctcccaagcgttcggactgctggtgctctccatccggcgtgccaccaaacttgccaccgccatggaagcgcgcggcttcggctccggcgccccacgttcccaagcccgcatctcgcgtctgaagcctatcgactggatcttctacgtcatctgtctggccgtcccgctggcctccataggcgtagccgtcggcaccgggaattggcacttcgcctttcagggtgtctgaaaggcggcagactggcacagtgcctttcagagtgtctgaaaggcgacagattagcacagtgcctttcaaggtgtctgaacgccttatgatgcccccgctggcgggggctgtcggcgtagccgactggggtggttccagcctcgaccaccctcagtctcgcgactgacgtaatgacccggcagtagggtagtggctatgcccatcaacgcccagattcttgataatccgaaatccgaccgcgtgcgccgcatcgccgatctgacccgcgccaaaggccgcgaacgttcgggccgttttcttatcgaaggcccgcaatccgtgcgcgaggccgtcacttggcggccggacgtggtgcaggacctgtatgtagaggtttcgcaggcgctggaacatccgcgtatcatctcctccacgttggagaagatcgtcgaaacctcgcaggatgccacgatttatgtgcactactgcaccggcgacgtgatgcgccgcatcagtccggacgcccaaggcatcgcggccgtcggcaatgccgagtccatgcacgccggagccgatgacgtcgaacttggcaagaacggtcgggccccgcagattgccgccttctggcaggtgcgcgacccgggcaacgccggcaccgtgatccgtgcggccgatgcggccggctgcgacgccgtaatcttcgtggacgactgcgtggacgtgctgaaccccaaggtcatccgctccaccgcaggctccctgttccatctgccggtactcgccatgagcaccgacgaattcttcacctggacaggcgaccataatatggacgtctgggccgccgacgtatacggcaccgaagaacgcaagccggaaagcctgcccgcagtactggcggacaaggcggcggtcgaggctccgaaagccgtgctgttcggcaatgaggcgcgtggcttggaaccggacatcctcacgcgctgcggccgcatcgtctccatcccgctttatggcaaggccgaatcgctgaacctcggcacctcggccgcggtgatgctgatgtcgctgtctatgtcgggtcatgttgaaagaatgtgaaaccggtaaaaacgctgtgaaacgctgagaaaacatcagacgaaagggttctcgtggcagaacaaatggtgttcgacgccgaccaggtgaccgctgaggttgccgagggcatcgagaaaatccagaacgcctccaacctggaggagctcaaggccatcaagacaacgtacgcaggtgccgattcggcgatgaccaaggccagcaaggccattggctccctgcccgccgaccagaagaaggaagccggcaagctcatgggcaagctgcgcgccgacttcggccgcgcctatggtcccaaggaggtcgagctcaaggaagccgccgagaaggccgcgcttgccgccgaaaccgtggatatgacgctgccggtgagccgtaagcctctgggcgcccgtcacccgctgcctaagctgatggaggacgtcgaggacttcttcatctccatgggctggcagatctcctccggcccggaaatcgaagccgaatggtacaacttcgactccctgaatttcggcccggaccatccggcccgccagatgcaggacaccttctacgtcaagggcaatcaagccaaggacgccgccggtttcgtcggctccaacatggtggtgcgtacgcagacctcctccgatcaggtccgtgccctcctgacccgtggagtgccgctgtacatcgcgtccccgggccgcgtgttccgcaccgatgagctggacgccacccatactccggtgttccaccagtgcgaagccctcgccgtcgacaagcacctgaccatggccgacctgaagggcgtgctggacaagctcgccgtcgccatgttcggccctgaagccaagacgcgcctgcgcccgagctacttcccgttcactgagccgagcgccgaactcgacctgtggttccccgacaagaagggcggccccggctggctcgagtggggcggctgcggcatggtgaacccgaacgtgctgaagtccgccggcatcgacccggacgtctacaccggtttcgccttcggcgtcggcatggagcgcacgctcctgctgcgcagcgacatcaacgacatgcacgacctggtcgaaggtgacgtgcgtttcgccgaacagtttgtgatgggggagtgattcagccatgcctatgatcgatatcgattggctcaaggaccatgtcgaggttcccgaaggcctgacctacgaacagctcgccaaggaccttgtcaaggtgggtcttgaggaagaggagattcactcctctcaggtgaccggcccgattgtggtcggctacgtggtcgacgccacccccgaaccgcagaagaacggcaagaccatcaactggtgccacgtggactgcggcgacgaatggaacgagaccgacgaagacggcaacaaggtgccgcgcggcatcatctgcggcgcgcccaacatgaaggccggcgaaaaggtcgtcgtcaccctgcccggtgccgtgctgcccggcgacttcaagatcgaaccgcgcaagacctacggccacatctccaacggcatgtgtgcctccgaacgtgagctgggtctgggcgacaaccacaatggcatcatcctgctgcgtcagtatggcttctccgaggctgaatacgaggctctgaagcctggtcaggacgccatgcacctgctgcacctcgaccagcctctgcttgagatcaacatcaccccggaccgtggctacacgctgtcctaccgtggcgtggcccgcgaataccaccactccaccggtgccgcctacaccgatccggccgtggcactcaacgagaaggccccggaacctgctgactaccagcccggcaccccggtggacatcgatgttgaaatcgacgataacaatccgattcacggcgtgcccggttgcgaccgctactacgcgcgtatcgtcaaggacttcaatcccaacgcccacacgcccaactggatgcgccgccgcctgatccgcgccggcatgcgctccatctccttggccgtggacgtgaccaactacgtgatgcttgacctcggccagccgatgcacgcctacgacctcgacaagctcgaaggcccgattgtcgtgcgccgcgccaacgagggtgagaaactcaccaccctggacggcaaggaacatgacctgagcgtcgaagatctgcttatcaccgattcgccgaacggcgaacgcggctcgcgcatcctcggccttgccggtgtgatgggcggcctgtatggcgaagtgaccgccgacaccaagaacattcttctggaggccgcgcacttcgatcaggtgaccatcgcccgttcggcccgtcgccacaagattccatccgaggcctcccgccgcttcgaacgtggcgtcgacaccgcgctgcagcctgccgccacccagatggccgccgaactcatggccaagtacggcaacggcgagcccagcgaacacccgaacgacgtgaacaacacgccgcgcgccaaggccatccacttcaaggcctccgaagtggcccgcgtagccggcctcgacgtggacatcaaccgcatctccgacatcctgaccgacattggctgcacggtggccggtggcggcaacggtgagttcgccgtaaccgcgccgagctggcgtccggacttgaacgagccgtgcgacctggtcgaggagatcgcccgactggtcggctacgaccagattccgatcaccgtgccgccggcaccggtcgagggtctggtgggcctgaccccggaccagcagcgtcgccgtcgcgtggcggacgagctcgccgagttcggcatggtcgaatcgctgagctacccgttcgtgggtgacgacgattacaaggccttcggcttcgacccggaagccaccaagaaggtcagcgtcgagatcgccaacccgctctacggcgaccgtccgtacctgcgtcgcgagattctgccgaccctggccaccaccgtgcagcgcaacatccgccgcggcatcgaaaacgtgtccctgtacgagctcggccacgtctacctgtgggatccgaacgcgcccgccatcccggcactgcccggcggcgtgcgccccaccgacgaacagctcgccgcgcttgacgccggtctgcccgaacagcccgaccatgtggccggcatcctgaccggtctggccgaggacgacggctggatgggcggcaagcgcccggtcgactggtccgacgccgtcgaggccgtgcgccgcatcgccggccgtatcggtgccgcaatcgaactcgaccagcccgccgccgacgatgtgccagtccaatggcaccccggccgcgccgcccgcgtcatggtgggcgacgtcttcaccggctgggttggtgaactgcacccgcgcgtcaacgaggcgctcggcttcccggcccattccgcggccttcgagctgaacctcaccgcgctgttcgccacgctgaccggcaagcccgtccaggccaagccgatctccacgttcccgccggtcaagcaggatttggccttcaccgtggacgagaccgtgaccgcaggccagcttgagaacgtgattcgcaaggccgccggcgcgaacctcgaatccatcgaactgttcgacgtgttcaccggcgaacaggtgggcgagggcaagaagtccctggcctatgcggtggtgttccgttcaccgagcaagacgctgtccgccgaagacagcgacgccatccgcaaggccatcgtggctgaggccgccgaaatcggcgcccagctgcgcgcctgacccaaccaatcatccgaatcgaggagcgccatgagccaagcggagcaggacaagccgaaatacgggcagtaccagcagcctgaatatggtgctatgtctggccaatacgggccgaattacaacccgtatatttatggcgctcccgagccggatactaagaaggattccgccgcagccgctggcgataacggtggcgcggcacaatctcagcaggctggccagccgtatggtcagcagccggcgtggcccggcaatcagcaggcgggcggctggccgtacgctcaaggcggccaacagtccggtccgggcgcatatccgggcgggtacccgggcatgcagggccagccgtatggtcaacagccgaacggtcagcctcaccagccgcattattaccacggcatcgacctgaacgatccaaaccagaacccactctacgggcactgggattcgtatgcgatcatctcctttatcctcgccctgttcttcccggtgccagtgctctcggcactgatgggcgcggtggcaatgtggcgcacgcgcactttccatatgaagggcttcggtttggccgtggccgccgtggtaatcaacgtgctgtacaccatcgccgtcatctggatggccttcaatggctatgacgccatgagcctttaccaggaagccctccagcaactgaccggcggcaccggttcctcctccgactccatctccgcataagtagcgttcacataccaacacacccactgcataaatatgcaatagtctgcataatcgcgtatactcatccgaagacacatcagtgaaaagagatgagtatggcgaaatatacagtggccgtggccggtgccacgggctatgccggcggtgaagcgctgcgcattctggccgcgcaccccgacttcgacatcacctgcgtggcaggccattcctcagtgggggagtcgatggccaagcacatgccgcatattccccaactggccaatctggtcgttgaagataccacgcccgaagtgctgaacgggcatgacgttatcatcctcgcactgccgcacggtgcttcgggcaagctcgcctcgcagctcgatccgaatgccgtggttgtggatttgggcgccgaccatcgcctcgaagaacaggccgcttgggatgagttctacggcggcgatttctatgagcattggacctacggcatgcccgagctcatcaccggcaaagctgcggacggctcctacacccgccagcgtgcggcgcttcctggcaccaagcgcatcgcaggtcctggctgcaacgtcaccgccaccacgctggccctccagcccggcatcgccgaaggactggttgaatcgcaggatatcgtggccgatctggtcgtcggatactcgggtgccggcaagaatctcaagcgcaccaacctgcttgccgccgaggccctgcaatccgccctgccgtattcggtgggcggcaagcaccgccacattcccgaaatcctgcagaacttcgcccacgcggccggcaagagcgcggccgaagccagcgaattcacgctcggcttcacaccgattctcgcccccatgtcccgaggtatcctcgccaccgtgtccgcccgcatgacggacaaggccaagacactgagcgatgaggagattcgcgccgtatggtccaaggcctatgaaggtcaggacttcatggtgctgctgcccgagggcacgctgcccgccaccggcaacatcatcggatccaacgcagcccacctgcaggtcgtcaccgaccgcaaggccggccgcatctacgcttttgccgccatcgacaacctcaaccgtggtaccgccggacaagcggtccaatcactgaacatcgcactaggcctgccggaagacgcgggcctgaccaagatcggagtagcaccgtgagcgttacatttgcacaaggtttctccgccgccggcgtggcggctggtatttcatccgtcgaaggcaagaaggacttggccctcgtggtcaacaacggcccgctcgacgcggctgcaggcgtgttcacctcgaaccgtttctgtgccgccccggtgcagtggagccgtaaggtcgtcgccgacggtcacgtcaaggccgtgattctgaactccggcggtgccaacgcctgcaccggcgaggccggttacgcccagtccgtcgccaccgcggaaacggtcgccgggctcatcggcgccgaaccgaatgatgtggctgtctgctccaccggtctcatcggtgaactgctgccgttggacaacgtgctggctggtgccaagagtgcccatgaggctcttgccgccaccgccgaagccggcaccgacgcctcccacgccatcatgaccaccgacaccaagccgaagacggtcgaactgaccggctccaacggctggaagatcggcggcatggtcaagggctcgggcatgattgccccgcagctggccaccatgttgtgcgtcatcaccaccgatgcggttgtctccgccggtcagatgcaggccgcactcgctgtggctgccgaacattcgttcaaccgcatcgacgtggacggctgcatgtccaccaacgacacggtcctgctgctcgcctccggtgcctctggcatcgaaccggacaaggacgaattcaacaagctggtgcgtgaggcctgcgcatccctgtcccgccagatcatcggcgacggcgaaggtgcctcccacgacatccgtatcaccgtcaccggtgccaccagcgaagacgcggcacttgcctgtggtcgtgccgtcgccgcctcgaacctgctcaagtgcgccatctccggcaacgatccgaactggggccgcatcgtcagctccctgggcactgtgccgcctgaagtcgcgccttacgattcgaacaaggtgaccgtggacgtcaacggcgtgcgcatctgcgagaacggcggtgccggccgcgaccgtagcgaggtcgacatgaccccgcgcgaagtccacattgacatcgacctgaacaccggctcggacgccgaggccaccgtctggaccgacgatctcacccacgaatacgtccacatcaacgccgactacgaaagctgacaaacagcccagtgggctgtttgtagcagccggcagcgatagcgtcgccggcgtcgcagaaaagagaaaaattgtctacagaattgaagggacctgggttccatttcgacgtgcacaccgatttgcgcgccgatcagaaggcagaagtgcttattgaagcgctgccatggctggaggagttcgccggccagcgtatcgtcgtcaaatacggcggcaatgccatggtcgatgaccatctgaagcagtgcttcgccgaagacatggtctttctgcgtcaggtgggtctgcacccgatcgtcgtgcacggcggcggtccgcagatttcccacatgctcaaggccctcggcatcaaatccgaattcaaaggcggcctgagggtcaccacccccgaggccatggatgtggtgcgcatggttctgaccggcaaggtgtcacgcgaactggtaggcctgatcaacgcgcacggcccgctggccgtaggcatgtccggtgaagacggcggcctgttctcggccatgcagcgcaggcccgtcatcgatggcaagcccaccgatatcggcctggtcggcgacgtggtttccgtcgatgcctcggcagtcgaggatctggtggctgccggtcgtatcccggtcgtctcttccgtggctccgaacgaagaagatgccactgaagtgctcaacgtgaacgctgattccgccgccgccgctttggctgccgctgtgggcgcgcacaagctcgttatcttgactgatgtggatggtctgtacgccgattggccggataagaattctctgattggccggatcggtgtggaaaacctgcgcgatatgctgccggacctggaatccggtatgcgacccaagatggaggcctgtgtcagggccatcgacggtggcgtgccccaagcccatgtcatcgacgggcgcaagccgcattcgattttgaacgagatattcacctccgcaggcatcggtaccatggttatgcccgatgaaggactggaaatgaggagctcttatggctactgagcatgaggaaaaactaggtacggaagacagcaagtggctgggagagtactctcaggtccacatgaatgtgttcggtacgccgttgcgcgtcatggatcacggccaaggtgcccacatctgggatgttgacggtaacgaatacctcgatttcctggcaggcatcgccgtcaattccctcggatacgcccaccccaagtgggtcaaggcggttgccgatcaggctgccaaggtggcgcatatcagcaactatttcgcgtccgagccgcaaattgaattggcatcaaaactggtcaagctggctggtgcacctgaaggctccaaagtctacttcggcaactccggtgctgaaggcaatgaagctgccctcaagctcgccaagctgtatggacgcaccttgcctggtgccctgccttccatcggcggcaagcccgcacgcattctcgcaatgactcacggcttccatggccgtacgatgggtgcgctgtccgccacgtggaaacccggtatccgcaagccgtatgatccgctggtgccgaacatcgaattcgtgcgcgccggcgacaaggtcgccctgcacgacgcttttgcacagaccggtctcggtcgctatggcaagggtccggtggctgctgtgattctggaacttatccaaggcgaagccggcgtgcagccgttgggcgccgattacgtcaagttcgtgcgcgaactgtgcgatatcaaccacgcgctgcttatcatcgatgaagtacagaccggtatcggacgtaccggcaagtggttcgcattccagcgtgacgatctgtccggcggcgtgacgccggatatggtgactttcgccaagggtgtggcaggcggattcccgatgggcggcatgatcgctttcggcgagaaacttgcggctctgttcactcctggttcccacggctccacctttgccggcaatccgctgggtgcggctgcgggactcgccactcttgacgtgattgaagacgagaatctggtggccaacgccgaagctcgcggcgaacagctgcgcgatggcattatggccaccggtaatccgctgttcgtttccgtacgcggccgtggtttgctggacgccgtcgagctcaagcatccctgctcccacgcggtgatgaactactgcctcgaacacgggctcatcgtcaacgcggtggctcccaatgcgctgcgtttcgcaccgccgctgattgtaaccgcacaagacgtggaccaggcacttgccatcctcaaggatgtgcctacggacctgcccgacgactgatttctctctgtcactgccgacccaccgatccaaggagatcatcatgaccccagaacttcgccacatgctgcgtgacgacgacctcaaccatgaggaacagaagcaggtgctcgaacttgccatcaagttccaccacgaccgcttctacaagcagccgttcgccggtccgcaggccgtcgccgtactgttcgacaagccctccacccgcacccgttccagcttctccatcggcgttgccgagcttggcggctacccgctggtcatcgacaagtccggctcccagctgggccgtggcgagcccgtggccgataccgctcgtgtgctcaaccgcatggcttacggtgtggtgtggcgcaccttcggccagggccgcgtcgaagaaatggccaagtactccacccatccggtggtcaacgccctgaccgatgacttccatccctgccagattctcgccgacttccagaccatcgccgagcaccgaggcggcgtcgacaacctgaagaaccagaccatcgcctacctcggtgacgcggccaacaacatggccaactcctacctgctcggcggtgccgtggccggcatggacgtgcgcgtggccggcccctacggctacctgccccgcccggacatcgtggccgacgccaagcgcgtcgcggccgagaccggcggctccatcctggtcaccaccgatgccaaggaagcggtgaaggacgccgattgcgtgttcaccgacacctgggtctccatgggcgaggaggccgaatacgccatccgttccaagccgttctgggattaccaggtcaacaccgaacttatggcattggccaagccggatgcgctcttccagcactgtctgcccgcctaccgcggcaaggaagtcaccgctgaagtgatcgacggcccgcagtccgtggtgtgggacgaggccgagaaccgtctgcacgcacagaaagcgttgctgacttggttgaccggcaaggcccgtggagacgaaagcctgctcgcatgagtgaaaccggtccgtccctgcagcgccctgccaccagggcggcgcggctgagtgccatagaacaggcgctcgccacgcatatcatcacctcgcaatcacagctgtccaaaatccttatcgacgagggcattgcggtgactcaggcgaccctgagccgcgatcttgacgagatgcatgcggtgaagacccggctgaaggacggcacggtggcctacacggtgggtcgcagcgtcgttgcttcagaaggtgaggatgtaggggagcgcggtgaggcacagatgtcccgcgtgctgaacggactggtcacctcggtggctgccgccggaaatctggttgtggtgcacacgccttccggtgccgcacaatacgtggcctcggtgattgacaagcagccgatcgaaggcgtgctgggcaccatcgccggagacgacaccgtcatggtgatttgcaccaatgacgacaccgccgtctcccgctccgactggctactaagtctcgcttccaaataaccaacacgccgtgcataaatatacagtcctctgtatatacttgcatcagtttgtttttcagaccttgaacgaaagggaaccaatggcagataacaagcgcattgttctggcctactccggcggtcttgacacctccgtcgccatctcgtacctgaaggagcgcaccggcaaggacgtcgtggccgtgtccctcgacgtcggccagggcggcgaaagcctcgagaccatcaagcagcgcgcccttgcctgcggagccgtcgaatcctacgtggtcgacgcccgtgacgagttcgccaacgaatattgcatgaaggccctcaaggccaacgccatgtacgaaggcgtctacccgctggtctccgccatctcccgtccgctgatctccaagcacctcgtgcgcgccgcccaccagttcggtgccgacaccatctcccacggttgcaccggcaagggtaacgaccaggttcgtttcgaggtctccattgcctccatcgacccgacgctgaaggccatcagcccgattcgcgacctgtccctgacccgcgacgtcgagattgcgttcgccaaggagcacaagctgccgattacccagaccgagaagtccccgtactccatcgaccagaacgtgtggggccgcgccattgagaccggcttccttgaggatccgtggaacggcccgaccaaggactgctactcctacaccgacgacccggccttcccgccggtcgaagatgaagtcgtcatcgagttcaaggaaggcgtgccggtcaagatcgacggacgtgacgtcactccgctgcaggccatcgaagagatgaaccgccgcgccggagcccagggcgtcggccgcatcgacctcatcgaggaccgcctggtcggcatcaagtcccgcgagctgtacgaggccccgggtgccgtggccctgattaccgctcatcaggagcttgagaactgctgcctcgaacgcgaacagcaccgcatcaagcgcgacatcgacaagcgctggggcgagttggtctacgatgcgcagtggttctccccggcgactcagtcgctcaacgcgttcatcgaggacacccagaagtacgtgtccggtgagattcgcatggtcctgcacggcggtcgcgccgtcgtgaccggccgtcgttccgactcctcgctgtacgactacaagctcgccacctatgattccggcgataccttcgaccagaagtcctccaacggcttcatcgacatctacggcctgccgtcccgcgtggccgcagcgcgcgacgtcaagttcggcaacggcatcgaggtcccggagaacaccgtcgagtaatcatttactttgactcccctcgttgaggggccgcgccgtaaagcaaacagcccagtgggctgtttgcaggtgaggtgcgaacgacagtgagccaacaatcagcagccgtcaggctgtccgtaattacaggacgctgtcgccgcagatgactgaggggagtacgagcaaagattatgctcgtgctcccctcgtttttttgccgatgacggaagaagctcagtgctctccgtaatgagttcggcagacggctatttccaggttttgaacatcgttacccgtaatgcggtatacgatgcggttcttttcatcaatacgacgtgaccagtatccctgacattgccgccatggaatacgaacaacttgaatccaccggtatgtagcccaacgctgatagtctgacaagcagtctgatttgtttgcaatccatggtttcaaggagccttcatgactgagaacaacgaacatctggccctgtggggtggtcgctttacgtctggtccgtcgccggaattggcccgactgtccaagtccacgcagttcgactggcgcttggccgacgacgacatcgccggttcccgcgcccacgcccgtgctctcggccgtgcgggacttctgaccgccgacgagctgcagcgcatggaggatgcgctcgacacgctccagcgccacgttgacgatggctccttcgcccccatcgaagacgatgaggacgaggccaccgccctcgaacgcggtctgattgacattgccggcgatgaactcggcggcaagctcagggccggccgttcccgcaacgaccagatcgcctgcctgattcgcatgtggttgcgccgtcactcccgcgtaatcgccggactcctgcttgacctcgtcaacgccctgatcgagcagagcgaaaaggccggccgcaccgtgatgccgggccgcacccacatgcagcacgcccagcccgtgctgctcgcgcaccagctcatggcccacgcttggccgctgattcgcgacgtgcagcgactgatcgactgggacaagcgcatcaacgcctccccgtacggctccggcgcactggccggcaacacgctcggcctcgacccggaggccgtggcgcgtgagctcggcttctcccgcgtgaccgacaactccatcgatggcaccgccgcacgtgatctcgtggccgaattcgtgttcgtggccgccatgaccggcgtggacatctcccgcctgtccgaggagatcatcatctggaacacccaggagttcgccttcgtcaagctcgacgacggctattccaccggctcctccatcatgccgcagaagaagaacccggatatcgccgagctcgcccgcggcaagtccggccgactcatcggcgatctgaccggcctgctggccaccctgaagggcctgcccaccgcctacgctcgcgatctgcaggaagacaaggaggccgtgttcgaccaggtcgatacgctcgaagtgctgctgcccgccttcaccggcatggtcaggaccatgcacttcgacggcgaccgcctggaagaggaagctccgaccggcttcgcgctggccaccgacatcgccgaatggctcgtcaagaacggggtgccgttccgccacgcgcacgagctctctggtgcctgcgtcaagctcgccgaaggccgcggccaggaactgtgggatctgaccgacaatgacttcatcgagaccttcgccgcgttcctgccggccgacaaggctccgggagtacgcgaagtgctctccagccacggttcggtcgactcccgcaacggcaagggcggcaccgcttacggtcgcgtgcgcgagcagatcgccgacgccaaggccgaggtcgaagaactcaagctcttccccgcatccacgtcggatggctccgcctacaaagcccccggcacgttctagtcccaatagagctccctctgatgagggagctctattttgttgttgtcactgcaacggcatacactgagaaaccgtaacgaacgggagccgtgaggctgagaggaagtcgccagacttcgaccggggaacttgacgcgggtcatgccgccgtaaggaatcgttgtcgcagatttgccgggttctccgatacagctttcattccgtttgcataattcagccgtgagacggtcgtgatggagccaatacatcacagcggtcgaacggtcgcatgattgggttcatgaatgggcgcaccacttaaggtacggttcgtttcgtgcacccttttttactatctgaaaggatattatgcaggtcaacggagagcaggtcacgctcgagacgccggtcagcgtcgccgattatctcgaagcgcacggattccgcgccgagcgtgtggccatcgaactcaatggtgagattatcccgcgcgataagcgtgccgacgccatgctcgacgaccagtgcgtcatggaaattgtgcagtttgtacagggtggatgaaaggaaaagctatgagcaatattaatccggttactgaagcatctgttgaggcgactccgctgccgccgcagcccgccgtcaccaatccggtcggcaccgccgcgccgattctcccggtggaagacaagccgctgaacctgggcggtcacgagttccagtcgcgattcattctgggctccggccgctacgacctgaacctcatcaaggctacggtcgaacatgcaggcacgcaaatcgtcaccatggcactgcgccgcgcgcagaccaccgagaacagcgtgctcgactacattcccgaaggcattacgctgctgcccaacacctccggtgcgcgcaacgccgaggaagccgtgcgtatcgcccgactggcacgcgaagtgtgccacaccgacttcgtcaaggtcgaaatcgaacacgagaccaagtacctcttgccggacaacgccgaaaccatccgagccaccgaaatgctggccaaggaaggcttcgtggtcatgccctacatgttcccggacccgattgcggcccgtcagctggaggaggccggtgccgctgccgttatgccgctcggttcgttgatcggctccaatatgggcctgcgcatgcgtgacttcatcgaaatcatcatcgccaacgcgcatgtgccggtcatcatcgacgctggtatcggccgtccgagccaggcctgcgatgcgatggagatgggtgcggatgcggtgatggcgtacacggccgttgcctctgctggcaatatcccgctgatggctgaggcgttcaagcacgccatcgatgctggtcgtgcggcgtatttgtctggccttggcaaagtgaccgagggacaggctgtgccgtccagcccgactacggggtatttgcactgacacttttattagctcccctctctgaggggagctggccgcgtagcggactgaggggagatggaaacatggagaaaacatggcattgactgatgaacaggtggagcggtacgcgcgccatctgattttgaagggtgtgggggtcaaagggcaaaagcggttgctggcctccagcgtgctcatcatcggagcgggcggtcttggttctccggccgccctgtatctggcggcggccggcgtcggccatatcggactggtggacggcgatgtggtggatatgagcaatctgcaacgccaaatcatccataccactgcacgtgtcggagcgcccaaagtggaatccgcggccacagccatccgcgcgctcaacccggatgtgacggttgatacctactacgagctcgtcgacgcgagcaacatcgccggcctcatcgaaccgtacgatctggtgatcgatgccaccgacaacttcgccgcaaaattcctcatcaatgacgcctgcgtgctggccggcaagccgtatatccatgccggcgtggtcggattcgccggtcaggtgatgaccgtcattcccggcgaaggcccctgctaccgctgcatcttccgcgacctgcccgccgccggtgagattccgacctgcaaggaagccggcgtactgggcgcggtggtcggcgtgatcggcagtctggaggcgactgaggccgtcaagctgattgccggcgtgggggagccgctcgtggctcgtatgctcactgtggatgccctgaccatgaacatccgccgtgtgccgttgccgaaccatgtgcccgactgcccggtgtgcggtgagcagccgaccattactgctattgatccggccaactatattcagccggcttgcgcgatttagagctatgtggcacccctccttgaggggagccaagatcggaacgagaggggaagaacatgcctattgctttgcgtaatgcggtcgatgacgatgagagcagtgaagcatcgtaccgccgcatcacgccggcggaatttgccaagctcgacccgaatacggtcacgctgctcgacttgagggaaccagccgacttcgccgcccacccggtcgaaggtgccatcaatgcaccactcgaccctctggcccatgtgctcaaaaccgtgcccacagatcgaactgtcgtagtctattgtgctcaaggatggtggagcgaggaagtagctgaaatccttgccgatcgcggctacgatgtagcaagcctcgatggcggttttcagggttatctcgactatcttgaaacccaccacgattaacggttcccgttgtcgttcttttggatgagtgtgcacggacatatttgtgccctacaatcggtcacggtattactcgatggattcttgaatatcgccgggtaatcgtaattcacaacaggggattgcactgaaccaacccaaaacgggaaggaccgaaaatcgtgggacatctgctcacccgaacgcagattcaacgcctggtcgccaagcacggccgtgaggtcatcgagcatcgccacatgcagatcgaacgctgctgctaccagcacggcaatgtcaccacgttcgaacattccgtgcgtgtcgcctgcctggctgtgtggatggccgaccgcgcacacctgtggtaccgcgtcgacctcaaatccctgattcgcgcggccctcctgcacgattacttcctgtacgactggcacgactgggataacggcgaacaccagtggcatggcttcacccatggccacgccgccctggtcaatgccctgaaggacttcaagctcaacgatatcgaacgcaacagcatcgagaaccacatgttcccgatgaccccggtgccgccgcgctatatcgaaggctatctggtcaccttggcggacaaatgctccgccaccgccgagaccttctcgttcgaccggttcaacaagcgcgcgttgcccgccgcgaagccttacgccgagatcgaagcccgtcgatgatcatcacactcgaacattatttcctctggtttctgttctacagtttcgtcggctggatgtacgagtccattctcgtctcctgccaacagcaccgcttggtcaaccgagggttcctcaacggcccgctgtgcccgatctacggcaccggcgcgatactcggcgtcgccattctcggcaacgtacataacccgatcatcatcttcctgatttcgatggtgggcgccacgatactcgaatacacaacctcgtgggtcatggagcagctgttccacgcccgctggtgggattactcgaacttccgcttcaacctccaaggccgcgtctgcctgctgggcgcgttgattttcggcctcggcggcgtgggcgtggtacttggttcgcagccatatgtcgagcgggtcacggatatgattccgctgccgatgctgcatacgctggtcacggtactggccctgatcaccatcatcgacttggcggtcacggttgcgggcatgctcgaattcgagcgggtgctcgattccgtctctcaggtggtgcaggatgtggcggcacgcgccggtggcacgtggcagtggggctccagtgcggtatccgacaggatgcgtgagctttcgcaggatacggttgagcgtctgcgctgggccgtcaatggcgtcatcaacgcacagcagaagcgtatgctcaagtccttcccgaagttccaggtgccggatcgtcaggacatcatcgactctttgcgcgaacttatgggcccgcgccgctagaataaggcgttttactgaatcgcgcggctcggctggtgttcggcactgtcgccatgttctgcgaaacttgactgtgcccaattgggcagtcttattcacaattcgatagggagaagcgacaagctatggctcacgtcaccgacttcaaggaagcgggtttcaacaccctgcttgaggaactggaatggcgcgggttgatttcccagtccacggaccgggatcgactcgcagaagcactgaacggcgagcccatcacctattattgtggcttcgatcccaccgctgcatcgttgcatatcggcaacctcgtgcagctcatcaacatgcgtcacctgcagcttgcgggccatcatccgatcgctttggtcggtggcgccaccggactcatcggcgacccgcgccagtccggcgaacgtacgcttaacccgaaggacgtggtggccggctgggccgatcgcctgaagaatcagatcggcggcattctggacaccgaaggcgcgaacgccgtacgtttcgtgtccaattacgattggaccgcctcgatgaccgtcatcgacttcctgcgtgacgtcggcaagaacttccgtctgggcaccatgctcgccaaggacacggtcgcccgccgcctgaactctgaggaaggcatctccttcaccgagttcagctaccaggtgctgcagggcaacgacttcctccacctgtttgacgaataccactgcacgctggaactcggcggctccgaccagtggggcaacctcacctccggcctggacctgatccacaaggtgcgcggtgtggacgtcaacgtgttcaccagcccgattatcaccgatgcttccggcaagaagttcggcaagtccgagggcaacgccgtctggctcgacgccacgatgctcagcccgtacaagttctaccagttctggatcaaccgcccggacgtggagatggaaagcctgctgaaggcgttcaccttcctgcccaaggccgaaatcgaacgactggtcgaggaatccaagaccaaccccggcaagcgcgaggcccagaagacccttgcctgggaggtcaccagcttcgtgcatggcgaggccgctacccaggctgccatcgatgcttccggtgcgctgttcggccgcggtggcaacctcgaagacatcgacgaggaaacgctggaatccgtgctcgacggtttcaaggtggtcgacgagaacggcgagcacgtcttccccgtctccaagcccggcgatcgcgtaatcgacgccgcccaggctgccggactgttcaagtccgcttccgaggcacgccgcgccatcaagtccggtggcgtgtatctcaacaacaaccgtatcgaggatgaggagcaggtgctggccgaagccgacttcctggcaggccgcttcgcgcttatccgtcgtggcaagaaggcgctcggcgccgtggaaaaccgttaatcaacaacgaattaaggaaaacaagtaatggcagaaggtaacgagcgttccggcaagtcttacggcggcggccataaggggtatggcgatcgccgaccgggcaaccgcggcggcaagggtttcaagccgcgcggcaagggcggtttcaagccgcgtcatgatggtgagggtttcaagccgcgtcgccgtgaggatggcgagggctacgcgccgcgccgtgacggtgatggcgagggccacggcggctaccgcaagtcgtacggcaagtccggcggcttccacaagggcggccgctccggcttcggcggcaagggcggttaccgcggcaatggtccgcgccgtgacggcgaaggcttcaagccgcgccgcgaaggcggctaccgttcccacgaaggcggctaccgttcccacgaaggcgagaacggcgagaatccgcgctaccagcaccgtgataacgatcgtcgtgatttccgccgcgatggtgagcgtcgcagcttccgccgcaacgacgaccgccgagatttccgtagggacgaccgtcgcgatggggaccgtcgtgacttccgtcgtgacaatgaccgtcgtgacttccgtcgcgatgaccgcagggataacgatcgtcgtgatttccgccgcgatggtgagcgtcgcaacttccgtcgcgacgacgatcgccgtgatggcgaccgccgcaacttccgcagggacgaccgccgcgatgatcgtcgtgacttccgccgtgacgatcgccgcgacaacaaccgtcgtgacggcgaattccgcgagttttcgcaggaagagaagcgccagtaccgtgaggagaagcgctctgaatacatgaggcgcccgcgccgtaactccgacggcacgatgagcttcccctcgcagaacccgtacaccgaccgtcgtcccgacgagcccaagatgcccaagggcatggaatggtcgatgctgtccaaggatgagcgcgaacgtctgcgcggcctgtccaaggagcacgcggagaacattggtctgcacatcctcgccgctttcgcgctggaggagagcgaccccgaacttgccttggagcacgccaagtgggtggcccgtcaggcctcccgcatcgacttcgcccgcgagacgcttgcgttcgtggcctaccgtcagggcgactacaagctggccctgcgtgagttccgcaccgcctaccgtatgaacggcttcctcgactacctgccgttcatcgctgactgcgagcgtggcgtcggagagccgaagaaggccgtggaactggcgctgtccgatgagggcaagcagctgcatggcgctcccaaggtcgagatgttcctggtgtacgccggtgcccttggcgatttggagatgtgggacaaggccattgaagtggttcacaccgtcggccgttcccaggggctgccgggtgagtaccgcatgcgtgccgtgcaggccgagcagtacttccttgaagaggccggccgcagcaaggaagccgagcagctcaacgacctgctggaccgtcttgaggaccagtatgccgacgaggagattgacgaaaacagcgacgacgtggtgatcgatcacgatctcgaagacatcaccgacgactccgacgtgctcgaaaagctcggcatcgatccggatgaggcgcagtacgccccggatccggagcaggaatacggcgatgaggatgacgaggctgaagacggtgatgccgagtctgatgaggccgacgagaccgagaccgattccgccaatgacgccgaggctgacgattccgccgaatccgccgactccgactccaccgaacccgaaaccgaaaccgaggagtgaacggcgtaatgacccgtttcctcaaaggcaccgatcgcccgctcgccgaggcctatcagcttgcgctgctggacctcgacggcgtggtgtatcgcggcaagaatccggtcgaatacgcggccgattccattcgtgcggccgaagccgccggcatgaccatcgaatacaccacgaacaactcctcgcgcttccagcacgtggtggccgaccagctcaagggcttcggcttggacgtggagccgtggcaggtcatcacctcttcggtggtggccgcccgtatggtggccaaggcgttgcccgccggcgcgcgcgtacaggtattgggcgccgagcatttgcgcgatgaggtcacccgcaacggcctgaccatcgtggacggtcctcaggaccgcccgcaggccgtcattcagggctggtatccggatatgacttggcagatgatggccgatgccgcgttcgcggtcgaggccggagccacgtatttcgtgaccaaccgcgacctaacgattcctcgtgaactgggcatcgcccccggttgcggatcgatgattcgcgccgtgatcacggccaccggcgtcgaaccggtcgcctccgctggcaagccggaagcgtacatgtacgatgaggcccgcgaactgaacgccgccgaaggccacgatttggtgcccaaggaggcgtccatcgccattggcgaccgcctcgacaccgatatcgaggccggtaaccgcggcgactacgattcgctggcggtgctgaccggtgtcaccaacccgaccgaactgatgctggctccgtcacacctgaggcccacattcatcgcccctgatctgcgtgaactcggcgaagcccaaccggagccggtccgcgatgagagcggtacttgggaatgccgcaaggctagcgcttggtttgaaaacggccaggtacacgtcagcgaccccaccagtatggacggcctgcgcgccgccgtatgcgccgcatgggaagccgccgaccaaggcgcacagcttagcgaggccacggtaccggtgttcgccatcgaggcatagtcctatgcctacggatagcgaacatgcgccggtcaccgagcgataccccgaacttgcggatatcgatgaacaagacaacgaccgcaagcttgagacctatcgcaacgtgctggaatccttacaacacgagcttgataacagccgcagctagcagaggtgattcattctcccgccagcggaagatgacgtgaagtgctggatggtggctccatgccgagccaccccgttggtggatggtgggccgaaaggaagatatatgaccgagcagcatatcgatcccgcgactccacttgaccgacttgacatgatgctcgtggcttcgggactggtcgaatcgcgggccaaagcgcagcgactcatcaaggccgggcatgtgcgcgtggacggcgagaccatcaccaagccatcgttcatggtcaaagccgggcacagcgaactcgccgtggataagggcgacgactacgtctcccgaggcgcttacaaactcttgggcgcgttcgaaacctttgccggcaatggccttaccgggccggaaggcttggaatgtctggatatcggtgcctccaccggtggcttcaccgacgtactgttgcgcgggggagcggccaaagtcgtagcgctcgacgttgggcacggccagctcgacccgcgcatcgccaatgacgagcacgtcatcgaaatgagcggcgtcaacattcgcgaagtagaggccgacgacctgccttaccggccggtgatgatcgtttccgacgtctcctttatttccctgacctatgtgatcccggtaatcgcgcgcatcgcggctcccggtgcgcagattgtgttactggtcaaaccgcagttcgaggtcggccgggcaggactcggcaaaaacggcatcgttgaagatccggcattgcgggagcgggcattacacgacgtggtcgcctgtgctgaacagcacggacttgacgtggtggccactgccgatagtcccatcatcggcacccacggtaatgaggaatacctgctttacgctgtcttgagatgaatgcgttggcagtctccgttcaccagcagcacgctggaggtacggtcgatgcctagtgcggtggcacacgtggcgctttccaccgcactgccgttgcgtagcatggcggagtccgccgtcaaagtccggcattgcagatggttggcttcaaccgtgacggctgtgatatggtgaaccgtgctgccatcctcatacccatccatatcaaaacgggaaaacatcgtactgcggagtggatgaacttccagagccctgctgttgacgtcatgacccttcaacacgccgttcaagcggactgtctgaccgctaatatgacgggtgcctagggagccattgacggacagatttccggaacaaacgatatcgccgttgcatcgtagtttgccggtaaaggttatttcatcgcaaataatgtcgccgccgacttcgatgtcgccgctgccgctgatgctggatacgcgaatatcaccatcacaccgcacaatgccacttttgatgaccagtttgtccccttctataactgaggcctcgagggtgctggtcacaatcatggtgtgaaaatgcgcgccatcggcaagacgggaacgttggtccactcctatggtgccgtagactcctttgcctatcagcgtgcaattctgcgtatgcttgcccatgatgataaaactccccttattaatatggacgtacagctttatggcttattgccacaataatgagcgcatccatgttgagggggttatatcggtcacgatgtgagcagatagggggtatagcgagcgcagttagggggttagccttggatgaagtggtcgatctgatcctgcttgcccatgaggatgagttcgtcgttgcgatgcatgaccagttccttggagccgtactggaactccttgcctggggccttgaggcccaccacggtcacgccgtacttgtcatgtacttgtacgtcctcgatgctgcggcctaccgcgtacaggggcgtgtggaccttgacgacggtgtacggcccgtcgatttcgatgtaatccagataattgccggccaccagatggcccacgcgcttgccggcatcggtctccgcgttgatgatgtggcgggcgccgatgcgctgcagaatgcgcgcatgctcctgggacacggacttggcccacaggtcggaaacgccggcgtccagcaggttgccggtgatgatcaccgaagcctcgatgctgtcgccgatggccacgacggccgtgtcgaactgggaggcgtcgatctgctcgatggccagcacatcggtcatatcggcctgaatggtgggcagatgcgcggaccaacgggccacaagctccgggttcttgtccactgcgagcacatcctgacccatctggtcgagggtggcggccacggacccgccgaaacggcccagtccgatgaccagcacgcttttgttgccgctcggttttgctgccatgatgatggtcctctctatgtcagattgctgggcgccgattgaatggccgatcagccaacgataatgttttcctgcggataacgaataggttcgggagccatcggtcggctgatggagtaggcgatggtcaacgggccaagtcgtccgacaatcatctcggcggacagaataaacaggctggccggattgccggcgcttgccacgcccaccgaataaccacccaacgagaaggccgagcaggcttcgaacacggcgtccacgaacgcgcagccggtggtgaacatcagcatcatcgcaccgaccataaccaacgcaaagcaggccgtggtcacggacacggcggtcatctgaatacggcgggggatacggcggcggaacacggtgacatcgcgatggccggtgaatgcggcgcggcaaatcaagagaatcaccgcgaacgtggtgacacggatgccgccagcggtggatgaggaacctgcgccgatgaacatgagtatgctcatgaacaccttggtctcattcgtgacttcgggcacccaggaaatatcgaaaccggcggagcggggcatgacggcggcgctcatcgcacggcgcatcttcatgccggggtcatctgcggggaacaggccggtattgctccactcgaccagcaggaaccaagccagtgaggtggccaccagcacagcggtggtcatcaaagtgagtttggtgtgcaatgtccaacgtttcgggctgagccgccggcgtgcgcactgcaccagattcagcaccacggggaagccgagcgttccgatgaatgcactgatgagaatcggcagccccacgccccaacggttcacatgcagaccagtggcatccggcgtgaaaccggtgttgttataggccgacaccgcgtagaacagcgcctgccacaaggtacgccccatattgccatggttcacgcggaacaggtcgggcagcagcagcacgaaggtcagcacctcggcgatgatggaggtgcccagcaccacggtgagcacgcctttgacctcggaaagcttcgtggtgcccagctcgttcgcggtgagcatacgctgggagaccttgagtctgcgggaaacgccaagagccaccatcgaggcgaaggtcatgactcccagaccgccgaactggatggagaacaggacgacgacctggccgaacatcgaccagtattcgccggtgttcaccaccggaatgccgcaggtggacagggccgagacggcggtgaagaacgcgatcgggaaattggtgaagatgatgtccgatgtggagatcggcagcagcagcaaaccggtgacgatgatgatcagtgcgccgaaatacaccatggacagacggcccgggtgcctgagcagacggtcggtgatgctgatacgtcgaatgcgcttggcggttttatcgcttttgtctcggctcagtacatcggctgaataccaccatgacaggtccttcgaggcctcctcattggcggaggattcgtcgaagtcattggccatgggtcctcaagctcctcaactgatactgctgtacggtcatacggcatgccatcgcgctgcgcacggcacgcgtacggtgattgcgcggctgtacgccattgtatgccgaagccttacgataatcgactctgtggaacgttgccggcgacgcgccacgaagcagcatttttcgaacacctgtacgactgatgacggtgtctgcggctagaataatgagcagtgcgaccgaatcgacaggaggatgccatggccaagcgcaacgcggtggtggtgacgcataccaggctcaggcagaccggaaccgtagtgggcgaggcggtgagccagctgcgagtggccggtttcgaagtcaccatcatcgacaacaccgaggcccccgatttcggcgtgcagccgccgtgcgtatcggacgacaccgaaatcgtcgtggtcctgggcggcgacggcacgatactgcgcgccgccgaactcgtccactgcacccaggtgccgattctcggcgtgaacatggggcatgtcggcttcctggccgaattcgaaagcttccagatcgacgaggcgatccgccggatcgccacccacgactattcgatcgacgaacgcatgatcgcccatgtggacgtctggctgcccggcgccaccaagcccattgaggattgggcgctgaacgacatcacactggaacgcgccgaccggggcaagatggtcgaactgtccatccgcgtggacgatgtggagatgaactcgttcggcgcggacggcgtcatcgtctccacgcccaccggttccaccgcctacgccttctccgcgggcggtccggtcatgtggccgaacgtcaaggccctgcagttgattccgttggccgcgcacgccctgttcgccaggccgctgatcatcggctccggctcgaccttcaccatcgatattctggacgattccatgtccgaaggctggatttgctgcgatggacgccgtcagcgcgccctgccgcagggtacgcgcgtcatggtgcgcgaatcgcgcgataccttgcgcctcgcccgactctccggcgtgccgttcaccaaccgtctggtctccaagttcgatctgcccgtggtcggttggcgcgagcacgcgcgcaacgaggcctcgagccagtcgctgcatcacgggcacacgttcccggcggccgcgtatgcggctggcgttgccgttgccggtgacgctggcgtcgctggtaccgagcccgacaagccgggcgaacgtgacggcaaggcaggatcctgatgctcgaagaactcgatatccgcaatctggggccgattcgagaagccaccattgcgccggccgcaggcatgaccgccatcaccggtgagaccggtgccggcaaatccatgctgctctccgcgatccgactggtctccggcggggccgccgaatcctcgcgcgtctcggccggggcggacgaggcttgggcccaggcgattttcgcgctctcggatgatgccgtcgcatctgaacattccggcgacaccaacgatgccggttctggcgatgccgacagtgggttcaccggtgctgccgcggccgtggccaaggcccatgacgcgggcgtcgaccccgaagacggcgaactgttcctttcccgcaccgtacgcgcttccggacgttcgcgggctgtgctcggcggcaagtccgtaccgcgttcggtgctgggggccatcgccggcgaactggttaccattcatggccagaccgatcagctgaaaatcgcggcctcctcacggcaacgcgagtttctggaccgggtggccggagacgaagccgaactggccgcctaccgcaaggcgtgggatgcgctggccgccatggatgagcggctggaacgcctgcgctcgcaggaatcctctgcccgccaacaggccgactacctgcgcgaatccatcgaccgcatcaaccgaatcgacccgcagccgggggaggatgaggagctgaaggcgcgccgcgaacgcatcgaaaacgcggccgacatcgcccaaggcgtgggttcggcgctgggcgcgctggatgcctcgcaggtggatgtggacgccgccgacggcgcttcggccgtggaactcatcaatcatgcggtgacctcgttgcgcgcgattcgcgtcggcggcacgttctccgagcaggccgatcggcttgaatccatcaatgccgatttgggcgacgtggtgttcgccctgagccaggagctgggcgacgaaggcagcgtggaggatctggaccagatcaacggccgtatccacgagcttggcgacctcgcccgtcggtggggccccaccttggccgacgtgctcgcttggcgggacaaggcggcgttcgatctggaggatctggatgcctcgccggaaaaggtcgccgaactcgaatccgaacggcagacgctgtacgatgcggccctcgccgccgccgacgtgctgagcgccgcgcgcgtggctgccgctgccgacttgggtgcgcgcgtcactgaagaactcggctcgctcgccatgctgggcgcttccttggaagtgcgcgtcacgccgcgagacaaggccgatgatccgctcggcccgtatggtcgcgacgatatcgcgttcctgtttacgccgttcgaggggtcgccgcagttgccgatgggcaaaagcgcttcgggcggtgaactgagccgactgatgctggccttggagctggtggccgccgacacgcgcggcggtgccgaccagaccttcatcttcgacgaggttgacgccggcgtgggtggcaaggccgcggtcgaactgggcaaacgtctggcacggctggcccgcagcgcgcaggtcatcgtcgtcacccacttggcgcaggtcgcctcgtgggcggacgcgcagttcgtggtcaccaaggagccgtcggatgccgatgacgacgatttgggcgtggtcaccaccatcgccgaagtcaacggcgaaacccgcgtccacgaaatcgcccgcatgctctccggcagcgaatccgaagcctccctggaccacgcccgagaactcctatccgattctcggcttacgctcccgctggcgggagctggcgccgcaggcgactgagggtggttgaagaagatggagattagcaaatgaccaaggccgccatattcgacctcgatggcaccctcctagactccatgggagtctgggaccaagtcgacatcgacttcctgaacaagcgcggaatcgaagtgccgcccgactacatgaccaaagtttccgccatgcaattccgccagatcgccgaatacaccatcgcacgcttcggtcttacagacacgcccgaagagctcatgcaggaatgggacgacatggccagcgtcgcctattccaccacggtcgaagccaaacccggcgcgcttgactatctgcgcgatctgaaagactccggtgtcaaactgggtgtcgccacctcgctgcccccgcgtctgcgtgagccggcgctacgccacgtcggcatgttcgatttgttcaacgatatcgtctccgtcgatgacgcgaacgacgtcggcaaggaccagcccgacgtctacctgctcgccgccaagcgcctgggtgctgcaccggccgactgcacagtgttcgaagacctgctggtcggcatgaagtcggccaaatcagtcggcatgaaggtctgggccatgcacgacgactcctccgcctccgactggcccgaaatctgccacctagccgacggtgtcctcttcgacttccacgacgccccgcgcgtgctgtgataaaaaagttacgcccccgctggcggggctgtcggcggaacggcgttgttcggcataggtacccctttccgaggccattgtaggcacggcccatgtttcgacactgtatgttggcgaggtgtttgttcaccgtttaactgttatgtaacacaccttgacagttaagcagaacagttatactgtgttgtataacagctaaacagctggggtgctagtcaaccgcaaccgaaaggggcatagatgaaactgatcatctcatccgtgtccggtgagcccatctacgagcaaatcaaaacccaaatccgttcggcggtgctcggcggcgagctgaaggcgggcgaggccctgccttccctgagaaaactcgccaaggagttgcgcatctccgtactcaccgtcaccagggcgtacaacgaactggccgatgagggcgtggtgcagaacatccaaggcaaaggcactttcgtgatggacaagggcaacgaactgatgcaacgtcagctcgaaacccagattcgtgaaagcctggccgaggcaagccggggcgccaaagccgccggcattccgctggacgcattggaccgcatgctcgaagaggaataccgcaaggaataacctcaagaaaggaccatggccatgaccgccatgtccgaatccgacgcgatggcgttgcaggtcaccgacgtcaccaaacactatgattccggcttcacgctggacgacgtgaccttcgacctgcccaagggctacatcatgggactgatcggcccgaacggcgccggcaaatccaccctcatcaaactcatcctcaacatgatccaccgcgacgccggttcgattcacgtgctcggcctcgacaacgtcgccgacgaggagcccgtcaaggaacaactcggcgtggtattcgattccagctacctgtatgaacagtggcaagtcaagaacgttgaacgtatcgtcgcgccactgtattcatcatgggacggtggatgctatcgcaagtatctgggtactttcggtcttggtggcgcacagaacggcaagaaacatatcaaggatctttcccgcggtatgcagatgaagttgatgctcgccatcgcattgagccatgatgccaagctgctgattctcgacgagccgaccagcggactcgatgtgcttgcccgcgacgaactcatggatatcctgcatgcctacattgaggatggcgaacattcggtactgttcagcacccatatcactgccgacctcgaacgtgctgctgacttcattacctacatcaccgatggccgtctctactacaccggtccgaaagacgagtttgaggaatcgttccgcctgattaagggcggtccagacgaactggcacaactgcctgcggacgtggtgctgggctcacatatgtatgccaccggattcgatgcgctggtccggtcagacaggcttgatgctgttgcgtcggtggtttcggggcttgccgttgaatcggcttccattgatgacgtcattcgcttgaccaatgcccatgattccaatcgtgacttgagcgggaggtgagcggtcatgggggcaatactgagggtgtcgcggtctcggcaacatgcattgaccactgcattgcgcgtcgatatggcctacctgtgcgtcggcgtacagactgtgttctcgttgttgttggcaccgttgttctccgtcatctttcaaggtgaagtttatggtgatggcttcggctatcgcatgggtgtcatcatgacggtattcacctgcgccatgtgggtgctcaccatggctgttgctgacctgcagaacggatatcggcttcgtggcattattccgtcttcaaggaagaaccaggtggccgcgcgatatgtggttggattggtgatttccgtattgtcggtagcgatgattgtgttgattgatgggttgcaagtgctgatcaatccggattggtcattcgcgggcaatctgtgggcggcgccgttgggaggtttctgcaccgcgctgatgatcgcgcttatcgtgcccacgggttatctgtggaccaaactaggcggtcttcaagtcacgatgatggtgatttatgtcgttgtattggctggatccatactgctatctattttgcctgtttcggtgaccagaggattggcccatgccgcgaatgccatcatcgcgcaacgattgtggctggttattgcggtattgacaacgacggttgtggcatatgggatctcgtatgtgattgcctctcgcatatttgcttcaagggagtggtgacgatgagctggaaatccgtagtaaagcaatgtcgattcgattgtgtcgggacgggtctgttcagcgtggcgaatatggtgtttctgctggttttcccggtgctgtctatcgtggtatcgctggtgatgatatcgacccatgtcgatgaacacgttgccagtggtctgatgggcggactcggaggtctggcatcggtgatggcatatatgagtgcattggggcctgctgcatccgaggaatctgcagggtacagtgccatgcgagggctgattcctgtttcacgcactgcgcaagttgtaggtcggtacctctttctgttggtggttggcctgctctgggctctggatgtggtgatatgcggtggcatcttcattatctttggcgatatagcagatatggggtggattggtgccttggcatcaggtgcctccatcttcgctttggctatcattcttgggtcggtgctgctggcctgtgcataccggttcaccttccgcaagatgatgatggcctttggcgcggtcatggttggcttgtatgccgtcattgcgctgctggctcgattgcctgtcgactggcaatggctattgctgaatattgccgatttcctgacgatctggtggcatacggcgcttgttctcgccgtgttgtgtctgctcgcattttttggctccatgcttatagccatccgcatctaccgagccaaagaactctagccgcgcatttgtccgaccgcgaatgaaaagagaccgacaggaatctgtcggtctctttccgttatcggtgtgttatcagtccaccagatccagagcgattggctggtgcggttgctgggaatcgctttcattggccgtgcggcgcgcgcggatggcggcggctgcgcgcttgacggtcttgataacttcctgcagcaccaccacgccgaaaccgaccgcgatgattttcagccacatgtcgatcggcagcggcacggtgcggaacatcgcgccgccgaattgcaccactagcacctgaagtgcgaacatcagcgcgaacacgccgatcatcaccttattgcgcagcagattggcgaacaggctggcgttgcccagctcgcggctgttgaaggcgttgaacagctggaataccacgaacagcgtgaacagaatggtcgactgctgttcggcggtgccgcccatgaagttcgtccagctttgcgccatgaacaccacggcgatgaacgcgccggagacgatgatgcgctccagcatgccgcgcgagacgatgccggcgtcgcggcgggtgggcctgcggtccataagattgtcgcgaatcggctccataccgagcgtcagcgcgggcgggccatccatgatgatgttgacccacagcagctgcaatgcggtgaacggcgcggccagaccactgaacagcgaggcgagtaccacgaccaccgaagacaggttcacggtgagctggaactggatgaatcgctggaaattctcgtaaatgccacggccccagtgcacggccttgacaatggtggcaaaggaatcgtccagcatcacgatatcgctggcttccttggacacctcggtgccggcgatgcccatggcgatgcccacgtccgcgttcttgatggcgggcgcgtcgttgatgccgtcgccggtcaccgccaccacattgccctgggctttcagagcgttcaccacgcgcatcttgataaccggcgtgctgcgggcgatcacgcggatgcggccgatttcgcgggacagttcctcgtcgctcatttcctcgatctggcgcgcctcgacggcgatatgccgctcgtccagaatgccgagttcgttggcgatggccgtggcggtcacgatgttgtcgccggtgagcatcttgagctcgatgcccgccttgcggcagcgctccacggcaccgggcacatcctcgcgcagggaatccacgatggccacgaagccgtcgaacatcatgccggattccaagccggcgcggtcggcagcgtaatcgagagccgcagtgtcggcgtccttatcggaaatatggcggtgggcgaagccgagcactcggcaggactgcgcctggaacttcgcgatctcccgttcgatttcgccgcgcgtcttggcgtcgacggcgcacaggtcgagcatcttctccgggctgcctttggcgaacacggtaatgccgtcgccgtcacgcaccacagtggtcatgctcttggtctccgacgagaacggatacgtgtggagcaccgtcgcgcgctcgcggtgaatccggtagtcgagtccggccttgtgcgcggcgaccaacagtgcgcattcggtggggttgccgatgaattccggcatcgcgccggcctcggcttcggtggcgcccgggaaggtcacgtcggcggtgccgttgacgcagaagttctccagcagcatgcggttcctgatctgctcgggcttctccaaggcgcggcccggcgcgttgtacgcctcgatcacggtcatgcggttctgggtcaacgtgccggttttgtccgagcagatcacgttgatgcagccgatggtctcgcacgccaccatcttcttgaccagcgcgttctgcttggacattttgatgatgttcaccgcgaggcacgcggccacgatggtcggcaggccttcgggcacggcggccacgatcagcgttatggaggtgatgaacgcctcggaaatcgtgtcgaacgaggcggtgccggaagccacgaaccgggccacctgaagcacgaacaccagtgcggccacaatcgagcccaccacggcgatcaccttgccgagcttcgcgagcttctcctgcagcggcgtcataccggtgttggcggcgcgcagttcgcgggcgatcttgccgaactcggtgtcgtcgcccacggcggtgaccacggcacggccattgccggcggtcacgaagcagccggaatacagcatgttcgtgcggtcggccaccggggtcttcgggtcggtgaacacggcgtcggcggctttggcactcggcacgctttcgccggtgagcgcggattcgtcggcggtcagatcgttcgattcgatgaggcgcgcatcggccggcagcttgtcgccggtgctgatctgcagcacatcgccgatggtgatgtctcgctgcgacaccagcgtgacctcgccgtcgcgcaccacggtgacggtcgtgtcgtcattgatgtcgttcagcgcttcgaatgccttggcgctgcgaccctccatcaccacggtgattgtcacggacagggcgatggcgaagaagatgcccacgcattcgagaatgtcggcgtggccgccggccatggcgcgggtgatgttgacgcccagggtgatggccgccgcgatcataagcatgatgagcatcgggtcggcggccgtcttgacgatgcgggaaagcatcgattccggcttcggcttggtgaaggcgttgggaccgtactggttcaggttgtgcgcggcctgttcgctggtcaggccttgatgtgcatcggtgcccagcgtgctgatgactgctggcgcatcctgcatgaatggtgcgggcgtctgcccgttggccgtggtcatatgttcctctcgtttggttgacacaccgcactgaaacccgcgtaatatcactcgcgtaccgcgcaacatggcggcacgcagccaaacgaatcgttgacgaccatgtatcgcatactccgcggtacatgagtctcgtcatttaaggcaaagccagaccgtaacggaactgccgacggccacgatgttgacttgccacattgcggtttgggccgagcccttcgccgcaatgctgtctactccctcatgggactattcagttgcagaaacagaacctaacaaaccacatggattttcccgttcgccggcagcatggcgattcccgccttcctagaaaaaacaagcaacacgccattggctcgttgcaggtgaaaagccgcaagaaagccgcgcgtgacaaggctcggacatgcttgaacatgcctggaccttcgacttgtgacatcagaaaacaaaaaaccgatacatgctggtaaagcatgtatcggttgggaattgtcagttagtgccgtcagcggactatcacagcgcctgggcggccttctccacgtagtcctccatgccgtcgatggccacgacgtccttgaaccgcacgtcggcggtctcaagaccacgcagggcggccggggcggtggtgccggtctcgcgggccagcacatccatgcactcgaagtcggtgccggtggcgtcgaagcccaatgcctcgttcaccacgcgcgggaacttgtaggggctggcggtggagagcagcacacgcggggtcagcgggtcgcgcggcatctgctcaagcaggtagtagccgcaggcggtgtgcgggtcgatcacgtagtggttctcatcccagcagtgcttgatggattcgcgcacctggtcctcgtcggcccagccggtgccgaagatctggcgaatcttggccagcagctcttccggaatctcgtacgtgccccactggttgaggtcgttcatcagcatggagatcaggcgggtgtcgccctcggacaagtagtacagcatgcgctccaggttggaggagatgaggatgtccatcgagggggagatggtctggaagaacgggcgctggcggttgtaggtaccggtggtcaggaagtcgaacagcacgttgttcttgtcggaagccaccacgaggtgcttgaccggcagaccgagcagcttggcatagtagccggcgaggatatcgccgaagttgccggtcgggaccacaaactcgacctcatcgccgacgttgatcacctggtcggcgagcagttgggcgtaagcggagaagtagtagacgacctgcggcaccagacggcccacgttgatggagttggcggaggaaagcaccacgtgcgaattgccggcgagacgctcggccagggcgcggtcgccgaagatgcgcttgaccgcggactgggcgtcgtcgaagttgccttccacggcggccacctgcacgttggagccggcttgcgtggtcatctgcagctcctggacctgggagaccttgccttccgggtagaagacggtgatcgcggtgcccggggcgtccgcgaagccggccagcgcggccttgccggtgtcgccggaggtggcggtgaggatcatgatcttctcgtccgcgtcgccatcggccggcgtggtgtgcgccatgaagcgcggcaggatctgcagcgccacgtccttgaacgcggaagtcgggccgttgaacagttcgagcacgtaatcgtcgcccaggggcttgagcggggtgatgcgctcgtcggaccactgttcgccgtaggcgtcggcgatgcactggcccagctcctcggccgtgaagtccggcagcagcgcgcccagcacctcggcggcgatttgctggtacgacttgcccggcagggaggccacgtccaccttggtcttgcccaacgcgtccgaaacgaacaggccgccgtcatcggcgatgcccttacgaatcgcctgcttggcggtcagcgaatcggtggtgctacgggtggaatggaaggtggttgtcacgatgaatccttctgcctgaaagggatgatgaatccacatcagtctagcgtgggccgtgggcagaagggccgtccgtctcgcataaccgaccggtcgcaccggcgaaaatcaccattgccatcgaacggggaccggccatatcatgaaacaggccggctgcaaacgggccatacggtaaggcgacaacggcgaatcaattgtcgcttataccaaagagcacccatgaccgcttcaccccttgcgcagaaggcaaccgatgctttcaacgcgccgatctgcgaaaccgatcctgagatcgccgaactgctggactccgaactgggccgccagcgcagtggccttgagatgatcgcctctgagaacttcgtgccgcgagcggtactgcaatgccagggctccgtgctgaccaacaaatacgccgaaggctaccccggccgtttctaccacgccgaggcgtacggcgtgaaccccgagaccttccgcatcgacccggagatcatccgccagcgcacgttcgacggtgccaagatccttgccgaacgactactggccgacgacgtcaaggccaacggcatcttcgtgctgaccggcggcaccgatgtgcatctggtgatggtcgacctgcgcaacagcgagatggacgggcagcagggcgaggatctgctcgccgcctgcggcatcaccatcaaccgcaacaccgtgcccttcgacccgcgcccggcctcggtggcctcgggcctgagaatcggcacgtccgccctggccacgcgcggtttcggcccgaaggaatatgaggaggtggccgacatcatcggcaccgcgctcgccgccggaccgtccgccgacgtgaccgcactgaaggctcgcgtcgacaagctcgccgaagacttcccgctctaccccgacctggaccagatccactgatttgctgattcactaatccaccgtggtgtaccggttagtgatgattcgctgaccggagcgcatcacatcaccggcttcccgcctgagatggaggggagccggttctgtttgcgattcaaaacgtcagacatcccataacaagcgggtcggagtaagcaatcagccgcgttgtgagttacgcttgactgttatgagcgatgaattgagtcctgaggtgttcgacgcggtgtgccgccaggccgatcaggccgcacgcgcgcaggagcgtcttgcacaggcaaataccgaagccaaaaacgaactgttgcttgccattgcggacgcgttggacgagcatgctgcggacatcgaagccgccaacgcgctggacatgctcgaatccaaggaaaacggcatggatgcgggcaagcttgaccgcctgctgttcgacgtgccgcgcgtggccgccgccgcccaaggcgtgcgtcatgtggccaccttgcctgatccggtcggcgaaatcgtgcgcggatacaatctgcccaacggtctgcgccttacccagacgcgcgtaccgatgggcgtcatcggcatgatttatgaggcccggccgaacgccactgtggacgtggccagcctgtgccttaaatccggcaatgccgcgttgctgcgaggcggtcacgccgccgaacgcaccaatgccgccacgctgggcgtcatcgccccggtgcttgaagcacacggtttcgaatccgcactggtgcaatccgtcgaccagtacggacgcgccggagccaccgccatgatggaggcgcgaggccatatcgacgtgctcgtgccgcgaggaggagcgggtctgatccaagccgtcgtgcgcaactccaaagtgccggtcatcgaaaccggtgccggcaacgtgcatatctacatcgacaagtccggtgatctcgccaaggccatcccgatcatcatcaacgccaaaacccagcgcgtgggtgtgtgcaatgccgccgagaagctattggttcataaggatgtcgccgccgaattcctgccgcagatcgccgccgctctggccgaggcgaacgttgtactgcaggccgacaccacgtcgtatgacatcatctccggcgcggcgatcgagggccttgacctcaaccgcgccaccgaggaggattgggacactgaatatctggccctcaagatgggcatcaaggtggtgccggatctgggcgcggccatcgaccacatcaacacgcattccacgggccacaccgaatccatcatcgccgaggattatgcggccatcgaggaattcgccaagcgcatcgactcggccgtggtcatggtcaacgcctccactcgcttcaccgatggcggcgtgtttggctttggtgctgagcttggcatttctacgcagaagatgcacgcacgcggtcccatgggattgcgggagatgaccaccaccaagtggatcggttacggaacaggccaggtgcgcgcatgaacgaggacggcaacatgaacactacggctgacacggcaaacaaggcaagcgaactgcggcccgacatcgacctcaacgatcccaagctcggcctgaagatcgcggccgaacggctcagcatcgtccgctatgtgttcctcgtgcagattgaggacggcatcgcctccgccgcccagcgtgcgtcgctcgaatacgcggacgccgtgctcatcggctggcccgagaccgattcacccgaagtcgtggacctcaacgatgcccagctcaagatcgtgcgcgaacacatggaactcatggaaggctacatcggcaaatacagccagatggagcacgacggcgacctcgacggcatgaccgacacgctcatccgcatcaccgagcgcgtggccgaggtccgccgcctctaccagccggacttcccgctgcccaccttcgccgagattcgtcgcgtggtccaagacgaatgggatgaagacatgggcaagatcgatcccaaggaagacaatccctccgccggcgaaatcgaagaggaaaccgaatcagccgatgacgccgccggcgagggcggccaggcatgagtggtgttaccggcagccacaaaacggctgcgtcagttcagtccgaaaaaacagtggaatccgccgagcccgccgaaatcattgccgtcacccaaggcgaaaccgaacggcgcatgtctgacctgtccgtaccggccggggccagcagccacggcaaaggcaggctttccgcacgcggcaactggcatacacgcctgcgcgtcggcatcatgggcggcacgttcgacccgatccacaacggccacttggtcgccgcctctgaagtcgcctgggtgtatgacctcgatgaggtgattttcgtgcccaccggccgacctgtgttcaagctggacaagcacgtcaccaacgccgaggatcggtatctgatgactgtgatcgccaccgcatccaaccccaaattcaccgtctcgcgtgtcgacatcgaccgtccgggcgtcacctacaccatcgacactctgcgcgatatccgcgcccaacatcccgacgccgagctgttcttcatcaccggcgcagacgccgtggccgaaatcatgcagtggaaggacgccgacctcatgtgggacctcgctcacttcgtggccgtcacgcgccccggctactccagcccggacggcgtgaccttgcccgaaggcaaggtcgatacgcttgagatcccggccttggccatctcctcgaccgatgtacgccgccgcgccgaacacgacgagccggtctggtatctggtgcccgacggcgtggtgcaatacatcggcaagcatggtctgtattcgtacgaggactgacgattcgtacgaggactagtgtgcatttgtacgagggctggtgaggattagcgcgaatcagcgcgcatcaatcctcgccagtgcaaaggatgaacggtcaggccagtcccatcttgattttcaatgtcattacgcgagtcgccgccgccgtcaccttcgaagcgaaagccggatcggacttcgcccgttcgttgaggccgtccacaattggctttacataatccgtctgaccgatgcaggacatgtcgccgcccgcctcgacaagatttactcccaattggcttacgtcgtagctgctcaacgcttcggcagacatcgaatccgaaatcaccacgcccgtgtacttcaggacgttgcgaatatgaccgtcgataatcgtagaagaaaacaccgccggattattcgggtcgatggattgatacgtggctaacgacatcatcaccatcgcaggatcggccttggtaatcgcctggtcaaaggcatctgcctcggccccgtccaacgtggtggtcgtatccagaatgccttcggtggtgaagtcggtattgccgcttaccgcgcccaacccaggataatgtttgaccgccgcaccgacttgagcgtctcgcaaaccttcaataacggcgatgccatgttcggcgttgccggccgcatccaatccgaaatcacgatccagcgcgccaatcggagcatttgaggcacgattgccaaccaccgtgccaagcaccggtaccaaatcgacatttatgccagcagtggctaattgcgaaccccacgtgcctgccgattgacgcaatgcgtcagcggacattgtgccctgctcaacggcactgggcattgtgtcgaaaccggtaccagtcagatgctgtacctgaccaccctcctgatcggtggcgatgatgagacgattgccggccggcgcatatccttggagttgcgcggtcgcggtcttgaccgtatcgacgccggtattccaattgccaatgagaatggccgagccaatgtgctcgtcggcgattgttgaagccaacgaggagggttcggaaccggcgaacaacggcaccatcactaactgtcccacacgttcctcaagcgtcatggcggataccgcacgttgggcttgtgccgccgggtcgttcttcttcggggaaggaacgtcggtgcgcggtaacgcactcgtctgggaggtctggggagtggtggtgttgccgtttgatgtggatttggcgaaccatccgacatgccatccgtagactgccacaccggccaacaccaccgccaaagcacatattgccgccacgattggaatgctcctgtgccgaagttggcgtgtggcgtgtgctgagggacgcatatgctgtggccgttgtctgttcataccggcaagcgtagaacaggatgttgcctcattctgtgctcagggcataaccgacctcccgccctttcgataggcttgagttatgtcttttaacgatcctttctcagtactgttcggcaatggcggcgattcacgacgcaacaatgcgaacaatgacgatccgatcatcctcgatgtcgaggccgatggggacggtccggcccacaacaccaacgctggcccctccgggtcatcccgccctccacgtggtccggccaatccgcgtatcacccgtaagccagcgtccggtggctcaggagccagccgtggcagcaagattctgatcggcgtggtgctggccttggccatcatcgtcggtctgttcttcggcctgtcccgattcatcaccgatctgatgtggtacggccagctcggcttccagtccgtggtctggacccagctcggggtgaaaatcggtctgtgggtggcctacgcgctgctcatggccctgaccggcttcgtttccgcctggctggccattcgagcacgccctgattcggccgacggttccaccattcgcattaacggcgatgtggtcgaggtcggcaaatccgtcagctcgaaaaccgctcgccgcgtggccgtggtgatttcgctgatcgtcggcgtcatcttcggttcccagtttaacgcgaactggagcgagattctgctcatgttcaacgcgcagtcgttcggcaccaccgatccgcagttcggtctggacaacggcttctacgtgttcgtgctgccgggcctgaagctcgtgctcgccgccgtggccatgctgctgggcgtgggccttgtgttttccgtggtcacgcatgtgctgatgggcggtatccgcattaccatgccggttaacggacgcggcctgttctccattaccaagcgttgccgtcgccagcttggcatctggctgatgctcaacatgttcgcttgggcagtgcgccagatgattggcgtcttcgaccagctcaccgtgcagggttcacgcatcaccggtgcctcctacaccgccgtacatgccaacatccccgtcaccttcatcatggccgtgctgaccgccatcctcggcgtggtgctgggcatctggctcatgcgctcccacacgctcgaaggccaggcgtccattggcgtgcgcgcttccgccgcgctcaaggcctggcgtgtgccggtgacctccattgccgtcgtggtcgtggtgggtcttgtgctcaccgtggcatggccggtgctgttgcaacgcttccgcgtcaacccgaacgcacaggagatggaatccacctacatccagcgcaacatcgacgccacccgcgccgcctacggtcttgacaagctcaagaccgagcaatacaaggtgaccgacaagggtgagcagggcgctctggccaaggaggccgacaccaccgcgcagatccgtctgctcgacccgcaagtcgtcagccccacgttcaaacagttgcagcagtccaagcagtactacaccttcgccgacaccctggcggtcgacaagtacgagattgacggcgtctcccaggacaccgtgattgccgcccgcgagctcgatctggccggcaatgacaaccgcaactgggtcaatgaccacaccgtgtacacccacggttacggcgtggtggccgcctacggcaacaaggtgaccgccgacggccagcccgaattcttcgaatccggcatccccacccagggcaagctcaccgaatccgaaaagtacgagcctcgcatctacttctcgccgaacaccaccgaatactcgattgtcggtgcccctgaaggcacacaggcttgggagttcgactacccgaccggttcggaaggtgctctgaccacgttcaagggcgacggcggcccttcggtcggcaacctgttctccaggattctctacgcgatccgcttcggctccgatcagattctcttctccgaccgtgtgaccagcgaatcgcagattctctacgatcgttcccccaaggagcgcgtggccaaggtggcaccgtacctgacgcttgacggccgcgtgtatccggccgtggtcgatggccgcgtcaagtggatcgtcgacggctacaccacctccgacgcctacccgtactcgcaaataaccgacctcggctccgccaccaaggattccaccaccgtctcttccgcaacggtctcgtccctgggctctcagaaggccaactacatccgcaactcggtcaaggccaccgtggacgcctacgacggttccgtggacctgtacgtgtgggatcaatccgatccggtgatcaaggcatgggagaagatcttccctggccagtaccaccagctctccgatatctccggcgacctgatgagccacatgcgctacccggaaagcctgttcaaggtacagcgcgagctgctctccaagtaccacgtgacctctgccagccagtactactcaggcgaagacttctggcagacgccggtcgatccgaccgaatcccagtcccagcaggaccaggacatcctgcagccgccgtactacctgaccttgcagaccggtggcaccgaggaaccggtgttctcgctgacctccacctacattccggctggccagtccacccgtgagatcctgaccggcttcctgtcggtcgactcggatgccggcaatgagaagggcaagataggctcgaactacggcaccatccgattgcaggagctgcccaaggattcgaacgtaccgggccccggccaggcgcagaacaacttcaacgccaacgccgatgtatccaaggaactgaacctgctgcaatccggcgacacgcaagtggtgcgcggcaacctgctcaccctgccgctcggtggcggactggtgtacgtgcagcccgtgtacgttaagtcttcgggcgtgacctcattcccgttgctcaagaagacgctggtcgcattcggtgatcaggttggattcgcggatacgttggatgaggccttggatcaggtgttcggtggcaattccggtgcggccgcgggcgatgccgagaacgtgtccggtgaccaatctggttccgataccaatggtggtcagtccggcaccacggacggaaagtcggattccggctcgtcttccgaccgcagccccgaactccagcaggcgttgaacgatgccgcccaagccatgaaggacagccagtccgccatgaagaacggcgactggaccgcctacggcaaggcgcagcaggagcttgaagacgccctcaacaaggccatcgagctcgacaagtaacttggcttccctcagggtgaggggagctatcgccgaaggcgactgaagggagtcggttacctcaactgacatagcccgtccttatcataaggacgggctatttgcgtattcaaaggaacttcatgccatacaccttccatccggccgtcgaatccgacatccaagccatcaccgacatctacaacgctgcggtggtggcgggtggggccaccgccgacctcaccccgcgcaccctcgaccaacgccgcgcctgggtcgaatcccatacgccgccctacggcgtttttgttgtggaatcggaagacggttcaatcatcggcttcggtgcgctctccgtgttctacgatcgtgccgggtatgacggcgtcaccgatttggcctattacatcgatccggcatggcaaggcaggggagtgggcacgttcatgcttgacaggctgctcaccgaggcgcgggcccgccacatgcgcaaggcctgtggcatcattttcgccgataacgtcggctccattgccctcatgcgccgcttcggcttcacccaattcggcctcatgcccgccgctgccaccgactccaccggcaccatgcgggacatgtcctactggtatttggacctgtaggcccgaggcggtttacccttgctctccatggattccggtgtcctataacactaaaaagttgtatcggatcagctcttttcctcgaacgccatatatcggacgcgcttatcccagataacggcaaactacgggacggcacgcgattttcgtccgttttgacgtggtatcccgcaatcacgtgggatgccacacacgtcaaacgatgcacatagctcgcgtcccgcaactcttcctgcgaaatcattggaattctgccattcttatgattcggtgcagataacgtgcgataacgcttgcgggatgccacgccaagaacgcccaaaatccgctgccgtcccgcaatatgtcatccgattgcagggaagcgtcatctgtctgagctgtttcccttgcttggcgtcgtaaacgacaagttgttgattgccgctgcatgtttctcctatttgagaaccgaatgctacatactgagattttttccaaccggagttgatgttaaagtgacgccaagctgggacacgctgttcgtgtgcggcatcctgtgcaacgtgctcgtctgcctggccgtgcgcatcggattcgccgcgcgctccgtacccgacaaggtgctgggcatcctgctgccgatcgccggattcgtggcgatgggcttcgaacactgcgtggccaacatgttcttcctgccgatgggcctggtcgccaaaacgtttggtttcggcgccgacgcggcgggcgtcgcggcgctcgacgtgtcgggcatcctctataacctgtccgcagccacgctcggcaatatcctcggcggccctgattcgtgatctgaccgactaccttgcggatacgggggaactgccggaattcgagcgtctgacgctctccctgattcaggagcgggagcgtaggaaaaagcaggagttgattcaacgtttcgtcgaccggaatttgccggaggcggaaggcgatctttcggatgaggagattctcgcgcaggcacgtatggaacgatttgggggacgggatgaaactgctgtttgacacgaatattctgctcgatttgtgcaatgacaaacgagcgcctttccataaacaatgtgttgatttgctcatggaagccgttgcacagccaaacattgagatcatggcgccggtatcgtcattgaatgacgtgtattgcgtgttgcgcaagcattatggcgaggagcgggcggcgcgagacgatatcggtggactgatggaattgttcgacatccgtccacttatggaacgccatgcgtgtatgtcgtaccggtccgatgagcccgacttcgaggacgggctcatccgtgccgttgccgaggacaatggcgccgacgtcatcgtgactcgtgacgtcgaagcgtttcaccattcatcggtccgatcgatggatgccgagcaatgccgtgccctgctgcttgccgattccaaggcttgacggcggcgttgagtacaatcttgacggttggatccggccgggcatgggccagtgcgcgaggcgaacgcgcgcatgacgtacggaacgtacagaacgtgcatacgggaataaaggaagacggacgaggagcggattatggcatcggatttctggctgattgcgggactgggcaaccccggcaaaaaatatgaggacacgcggcacaacatgggcttcatggccgccgacgtgctcgccgaacgttggacggtgaacttcgccgatcacaagggcttggccatgctcggtaaaagcgtgatgaacctggacggccgcaccgtcaagttctttctggccaagccgctgacttatatgaatgattccggcaatgcggtggcttccattagcgcctattaccagatcgagcccgaccatattgtggtgattcacgatgacatggacttggaattcggtcgtatcaaggtcaaggcaggcggctccgcaggcggccacaacggcatcaagtcgattgaccgttcccttggcacgccgaaatacgcgcgcgtgcgcatgggcgtcggccactccaagcgcggtgcgaacgcgcatgacaacacggtgaactgggtactgggcggcttcggcccggaccagcgcaagcagctgcccgaattcctggctgacggcgctgacgccgccgaggacatcatcttccacggtcttgccaagacccaggagaagttcaatggccggtgaggcgacgcacccggacctgatcaacggctcactggtaggcatcctgtccgggctggaacaggacaagaccttccttaggctcgccactggcgacatcgaggtttcggacgacgtcgacaactccatcctggccggcatccccgaaggtttgcgcccggctttggccgccgccataggccagggtatggccggcaaacccggcaagccggtcgtgctggtcgtggcctccggccgcgaagccgaagagaccgtgggctcgctgcgctcctggtatgatggcgacccgaacgacatcgcccagctcgaagcctgggaaaccctgccgcacgagcgtctgagcccgcgcgcggacaccgtggccagccgcatggccgtgttccgcagactcaagcatccgagcgataccgatccgatgttcggcccgattcgcattctcgtcatgccgatccgctcgctcatccagccggtcgtccaaggactgtgcgacgtcgagccgctcgtgttcaccgtgggggaggacctgcccctcgacgaagccgccaaacgtctgatcgaaaacgcctacacgcgcgtggacctggtcatggaccgtggcgagttcgcggtgcgcggaggcattcttgacgtattcccgcccaccgcaccgcacccggtgcgtatcgaattcttcggcgacgaaattgacaccatcaaggaattccacgcctccgaccagcgtacctacggcgacggcctcaagaccatctgggccaccgcatgccgtgaactgcagctgaccgacgccgtgcgcgcccgtgccaaagccttggtcggttcgattcccaatgctgaggacatgctcgaatccatcgccaacgccattccggtcgaaggcatggaatccctgatgcccgcactcgtggaccatctggaaccggtgggctccatgctgcccaagcacgccgtgatcctcctgagcgacccggagaaactgcgccgttccgccgaagacttggcaaaaaccgcgaacgagttcctggccgccagctggcatgtggccgcctccggccacggcgcaggcgcgcccatcagcttcgacgaagccagcttcctcgactatgcggaaaccatcagctccctcgaatactccgaacatccggtgattcgcctcaccagtttcggcgtggacaccacgctgaccggccacgtgcagctcgacgcccagaacccggccgaattccgaggggatgaggccaaggcctcccaaggcatcgaaggcctgctcgatgccggcttccacgtcaccatcaccgccgctgcggccggcaccttggccagactcaagcgcgcgatcaacactaccggcatcgccaatttcgacgtcatccgctctcaggccatcgacggcttcgtggacaaagccgccaaaatcgccctgctcaccgaacgcgacctgaccggccgcacttcagccgtggccgtggccaaaacgccgaaacgccggcgcaaggccatcgacttggtggaactcaaaaaaggcgattacgtggtgcacgagcagcacggcattggccggttcatcgaaatgcgccagcgcaccatcggcaccggcgccaacaaaaccactcgcgaatacctggtcatcgaatatgcgccttccaagcgcggcgccccggcggacaaactgttcatccccaccgaccagctcgaccaggtcagcaaatacatcggtgccgaagcccccaagctcaacaagctcggcggctccgattgggcggccaccaaggccaaggcccgcaaacacgtccacgagatcgccgacgacctgatcaagctgtactccgcccgtcagcgggccaaaggcttcgcgttcagcccggacaccccgtggcagaaggagctggaagatgccttcccctatcaggaaaccgccgaccagctcaccaccatcgacgaggtcaaatccgacatggagaagcccgtgccgatggaccgcctcatctgcggcgacgtgggcttcggcaaaaccgaaatcgcactgcgtgccgccttcaaggccgtgcaggacggcaagcaggtggccgtgctcgtgcccaccacgctgctggtccagcagcattacgagacgttcagcgaacgattcgagggtttcccggtcaatgtggcggccatgagccggttccagaccaccaaggagatcaacgggaccgtcgagggtctgcggtccggcacggtggacgtggtcatcggcacgcacaaactgctgaaccccaagatcacgttcaaggatctggggctcgtcatcatcgacgaggagcagcgtttcggcgtggaacacaaggaaacgctgaaggcactgcgcaccaatgtggacgtgctgtccctgtccgcgacgcctatcccgcgcacgctggagatggccgtgaccggcatccgcgaaatgtccacgctggccaccccgcccgaagaccggttgccggtgctgacctatgtgggcgcctacgaggacgcgcaggtcaccgcggcggtgcgccgcgaactgttgcgcggcggccaggtgttctatgtccacaatcgtgtgcaggatatctcgtccatcgccgacaagatccacacgctggtgcccgaggcgcacgtcggcatcgcccacggcaagatgggggagaagcagctcgaccagatcatccgcgacttctggcatcgcgacatcgacgtgctcgtgtgcaccacgatcatcgagaccggtctcgatatctccaatgcgaacacgctgatcgtcgaccatgccgaccgtttcggcttgagccagctccatcagctgcgtggccgcgtcggtcgcggccgcgagcgcgcgtacgcttacttcctgtacgacccgtccaagccgatgaccgagcagtcccatgatcggctcgccaccatcgcgcagaacacggcgctcggctccggtttcgatgtggccatgaaggacttggaattgcgcggcaccggtaaccttctgggcgacgagcagtccggccatatcgagggcgtgggcttcgacctgtacgtacgcatggtgtccgaagccgtggagaagtacaaggagcccgaagagaacgtcgagccggtggccgtgtccatcgacctgcccatcgaagcgtcgattccgatcgagtacatcgattcggacaagctgcgtctggaagcgtaccgcaagctcgcctccgcccgcaacgaggccgatctgaaggatctggaagaggagcttaccgaccgttacggcaagccgccggtcgaattcgagaccctgttcgacgtggcccgtctgaagttcaaggcccgcaagctcggcatttcggagattctcgcgcaatccaaccgcgtgcgcatcggtcgcatcgacccgcccgaatccatccagatgcgtatgggccgtatttacaaaggcacccaataccgcccggtcacccaccaactcatcgtccccaccccgttcaccggctccctgggccaaggtcccatgagctccgaccaggtagtcctctggaccaaccagttacttgatgatttggcatggaccccgtcgtcaagcaaacggcagagccgtttgtagacggggtgcgaggcgacagtcgagccagctatggctcaccgggcaacctccggtgagccatattcatattcatgccgtcgtttgtgacgatgatttaccccagacggaatcgttccgactgtccagcgagcgagattaagtgactgctatgagcgaaacgactacgagccgcacgaaccagagcgcgaccacggcaacacttgccggctatgagattccccgccttggcatgggcacgatggcgctcgccatcgaggggcgcccctccaaccgtgatcaggcaatcgagaccatccatgccgcgctcgatgccggagtccgttatttggacacggcttggtcctattatctgcccagcgcacccggcaccggcgaaccggaggatatgggctatggcgaatatctggttcgcgatgctctgcactcgtggcatggccccaaagatcaggtgctcgtagccaccaaaaccggctggctgcgcacgcttgacggcaacggcaactacggctggcaggccgacgcccgacctgaaaccatgatcgccaatgccaaggaatcagcccgccgcctcggtgtcgatacgctcgatctgctctactcgcactgcaatgatccgcaggtgccgtacgaagaccagatgggcgcactcaagcagctcgtggacgaaggtgtggccaaagctgtcggcatctccagaatcgacaacgcggacatcgaaaccgcccgcaatattttgggcgatcgtctcgtggccgtccagaaccagttctccccggtccaccgcgaccctgaacacacgttggaaacctgcgaaaagctcggtttggcttttgtctgctggtcgccactcggcggattcctcgacccgttcaacgagcatctgttcgaccggttccgcgaagtcgccaagattcacgactgctcctaccagcgcgtcacgctcgcgtgggaacttgcgcaataccaatatctgttcacgattccctcggccagaaacccgcaggagattcaggactcgttcaaagccagcgaactgaaattgtccgacagtgagatcggctacctcaatggcaaggacgttgactgagcgatttcgtccgtactgccttgcaatcaggcggcacactggcattgtgagcgctaacgctaaattttgggcgtgttgttcacaacgtccacaaatcgcactactcttaagaatgtcattcaagatacacaaccgttttaaggagtagttgtggcagtaattgaaagcgtgtacgcgcgtcagattctcgattcccgcggcaacccgaccgttcaggtcgttctggacaccgaagacggcgcccagggcaagggtctggttccgtccggcgcctccaccggtgaggctgaggcttgggagcgtcgcgatggcgacaagtccgtctacggcggcaagggtgttcttaacgcggtcaaggccgtgaacgaggtcatcgctccgaaggtcatcggcatggacgctgctgaccagcgcgctctggacgacctgatgatcgagctcgacggcaccccgaacaagggcaagctgggcgccaacgccatcttgggcgtctccttggctgctctgtacgcttccgccgagtccgccggcctgccgctgtaccgctacatcggcggaaccaacggccacatcctgccggtcccgaacatgaacatcatgaacggtggcgctcacgctgacttcgccaccgacattcaggagtacatgatctccccgtacggcttcgacacctactccgaggctctgcgcgctggcgttgaggtctaccacaccctgaagaacgtcctgaagaaggaaggcctgaacaccggcctcggcgacgagggcggcttcgccccgaagatgaagtccaacgaggactccctcaagtacatcatggacgccatctccgccgccggctacgagcctggcaagcagatcggcatctgcctggatgtcgcctcctccgagttctacaacaaggagaccggcaagtaccgcttcgacggtgaagagcgtgactccgcctacatgctcgactactacgagaacctcatcaacgagtacccgatcgtctccatcgaggacccgttcaacgaggaaggctgggaagactgggctgccatcaccgctcgcctcggcgatcgtctgcagttcgtcggcgacgacctgctggtcaccaacccggctcgtctgcagaaggccatcgacctcggcgccgccaactccctgctggtcaagctgaaccagatcggttccgtcactgagaccctcgacgccatcgagctggccaccgccaacggctacacctccatggtttcccaccgctccggcgagaccccggacaccaccatctccgacctggctgttgctaagaacacccgccagatcaagaccggtgccccggcccgtggcgagcgcgttgccaagtacaaccgcctgctcgagatcgaggaggagctcggctccaccgctcagtacgccggctacagcgccttcaaggcctgcaagaagtacctggccaagtgagctgaaacgcccgtaaaggcgtgagtttccactgaagctcgatacccgtcgtattcgtcaagtcgaatgcggcgggtattttcgtgtgacatgagcaagtcgtcccgtaccggcaaacctggcaaaaccggcaaagcacgagttaggaaaaaagggtcggcggggcctatagcgttcttcgtctccctgttcattatcgcccttggcaccatccagctggtctccaccttccacacctatgccctgaacctggccgaactcaatggtctcaagcgtgaggaggcttcgctgattgcccaaaagcaggagttggaaaacgacatcaagcgttgggatgacaaggcctacatcaccgcccaggcccgtgaacgcctcggcttcgtattccccggcgaacaggccgtgcgtgtgcttcatcccgaagccgtgaccggctccgatagcgaatcccagaaaacggaagattccagtagcagcaacaaaaaagtcctgccatggtacagcgaactgtcttactcgctcaaaaaggccgatgagcctgtgaccgatagcgagtccggcaaatccgatatttccggttcctctgactcgtcatccaacgactcatccaagcggtccgataagtcagaccagaacacccaatccgatcagaacacccaacagaatacccaacagaacacaggggagggaacccaacagtgaccatcgatatcgccgccaaggccaaggcccttgtcgataccgtgcttgccgagcccgccaacgatcatgacatcgacctggtgcagcgtcagctcggccgatacccgcgcggcatggtcgccgtgggggcgcgatgcgtctgcggtaggccacttgccgtaatcacccgtccggtgttgcccggcggaatccctttccccaccacgtgctatctgaccggtccggaagccgtcaaggccgcctcccatgtcgaggccgccggcgtgatgcagcaatacaacgacatgttggccttggacgaggagctcaaggccgcatatgagcaggcccataacctgtatctggcattccgccacgaactggcaggacgtcttggcgacagtgaggagcatattgaaggcacttcggccggcggcatgccggtgcgcgtcaagtgcctgcatgccctgctggcccagtccttggttatggggccgggcgtcaaccccattggcgatttggtactggaacgcgtcaaagacgaattcgatccgaccgtctgccgctgcacgctggacgattgatcaacagatgagccagcgcgaacagtccattcatacgcactaagggatacgaggagaaggcaatgagcaaggaatccgtaaccgtcgccggcattgattgcggcacgaactccattcgactgaaaatcgcacgtgtcgatgccgatggcatgcatgaggtggtgccgcgcatcctgcgtgtgatccgtctcggccaggatgtggacaagacccatcgttttgccgacgaagcgttggaacgcgcctatgtggccgctcgggaattcgccggtgtgattgccgaacatcccatcgacggcctgcgtttcgttgccacctctgcaactcgtgacgcggaaaaccgtgaggagttcgaggatgagatcgaacgtatcctcggcgtgcgccccgaagtcattcccggcaccgaagaagccgacctgagcttccttggtgccacttccgtggtcaatcgcgacgatctgcccgccccctatctggtggttgatctcggcggcgggtccaccgagctggtcatcggtggcgacggcgtcagtgcgcccactacccaggttcagggcgcgttttccatgaacatcggttccgtgcgcatgaccgaacgtcatctgaccaatgatccgccgacccagacacagatcgatgaggccgttgtggacgtcgatgaacatatcgatgaggccttccgcaccgtggacgcaggcaaggcccgtaccatcattggcgtgtccggcacggtgaccacgatgaccgccttggccatgggattgaaggaatacgatcacaccgtggtcgacgggcatcggctgagccttgaagacgcctatgccgtggacgacaagttccttaggatgacgcgcgccgagcgccgcgaatacaagaccatccaccccggccgtatcgatgtggtcggcggcggcgctgtggtctggagccgtgtgctggcgcgtgtcagcgaagccgccaaggccgatcatggtgaagccatcgattcgttcgttgccagcgaacacggtctgctggacggcattgtgctcgattatggtcgccggttgctggctcaatagcgtaagtggtaagtgcctccagcgggctgagccgttaagcaaacagcccggtgggctgtttgtaggcgaggggagcggctatgccgcgacggctgcacgaagtgcagcaacccgcaagcaatgctcagggcaggagatagcttataatagaaaagttggcctccgtggcgaaatggtatacgcagtcgacttaaaatcgatcgcttcggcttgtgggttcgagtcccaccggaggcaccttgaaatcggcctgtggccgatgccgttcgtggtctctccccagtcggcttcgccgacagcccccctcgtcagagggggctcgcagctcactatgtggagagcttataaggccgaaacaaaaggccgttaggctatgtggcgttgtgacgatgtacctgatgaaacgaggaatccacatggcttcacgctggaccgatgtcgaacgagtcgaacaaggcgcactgcccaccatgcttgcccaagccgtcattgcgggcactgcactcaccgttggtgccatcgcctgctcgggattctatctgtccatgatcggcaatgtggccgcactcctgccatgggcgactatcgtgatactgatcgccgtggcgttcacctacatcgtcggcttcgccctgttgtggtgtgccgaagccctgaccctgcgtgccaacgacaaactcaagccatggctgtacggcgtcgtcggattaatcggctacggcgtgtggggcatgttcgtgatgagcgcgatgatgaacacgctgaaccagccgctgaacggcgtggtgttgtcgaacggcgatgtgatggccctgaccgtcaactacgcggtgttcggcttcatcgccttcctgttggcacaggcgtacgcgcccaaaatcgccaccaagaagggactgaccatcgggctgatggtggtgcagatcgtattggccatcatcggtatcatcgtactggtcatgatgttctccgcactgtctcactgactgacttatcgctcgccggcacgacgcgcgcggccatcatcgcacaaggcgaaagcgattccgggcgctgggctgggatacgatatcgtgatggcatgacgcctggtaacaccggcatgccgaaccagcaggggagaaggagccaaatgttcagtgtgcttgacatgttcaccatcggcgtcggaccttcatcctcgcacaccgtaggcccgatggtcgcggcacatgctttcgcctcctcgttgcaggccgaccatttggtcgatcgcaccgcacgtgtcaaaatcacgctttatggttctctggcgctgaccggtctcggccacggcaccgatcgtgctgcgatggccgggctcgaaggcaatctgccggccaccgtggataccgaccacatgatgcacatccgcgagatctgcgcgttggacgatactctgaacctcgccggcctcaaacgcatccatttcgactacgaccgtgacgtggtgttcgaacaatggaagcgcatggccgcgcaccccaatggcatgcgattccaggcgttcgacgccgccgcaagcttggtcgacgaacaggtctggtattccatcggcggcggattcgtgcgcaaaggcgctcccgaagacccgatgatcggcattcatgaacgccctccggaaggcgcctcctttgccgatgcggacgagtcatcatccactgatttcggcgtcgaggcaccctacccgttctcatcatgcactgaactggtgtcgttatgccgggaacatcatctcagcatcgccgaacttgtatgggccaacgaaaccgcttcacgctcgggcatccaggtccgatccgatattgatgccatctggcgtgttatgcgcgcctgtgtggaccacggatgcacctcggcggaacccacattgcccggtggccttgacgtaccccgccgcgcgccgaaaatgtatcggcgtctcgcctcgaattccgatgtgctgcgccgcgacagccggcgcaaaggcgccgtgctcgagtcttccgacgccgcatgggtggatctcttcgccttggccgtctctgaggagaatgccggaggcgggcgcatcgtaaccgctccgaccaacggttccgccggcatcattcccgccgtgcttcactattactggcatttcgtggacaacgccaatgaacagggcgtggtcacgtttctgctgaccgccggtgccatcggatacctgttcaaacgcaacgcctcaatttccggtgcggaagtcggttgccagggcgaagtcggctcggcctgttcgatggcggcggccggacttgccgcagtcgtaggcggcacgccggaacaggtggaaaatgctgctgagatcggcatcgaacacaacttgggtctgacttgcgatccggtgggcggattggtgcagattccatgcatcgagcgcaatgccatggccgccaacaccgccatcaacgccgtgcgtatggccatgctcggcgacggctcacacatcgtgacccttgatcaggccatcgaaaccatgaagcagaccggtgaagacatgatggccaaatacaaggagacctccaagggtggacttgccgtcaatgtcgtcgaatgctgattgacatgtccggtattcaccagcatgatgaccggaattgacgtatacggccagcgtgtcgtatcgcacagggatgaaggactaccgccgattcgccgatggtgctaaggtagggcgcattgtgtctttgaaggaggactaatgacagatcagatgcctcaggtgaacgccgaatttggcaccacgcccgttatcgagttcccgacgcccgaagccccgaagggcctcaaggttgtggagctgaccgagggagacggcccgatcgtgcgtcgcggcgacaccgtcaccgtgaactaccacggcgtggtgtggggtaaggacaccccattcgactccagcttcgaccgtcatcagcccgccagtttcggcatcggcgtgggacaggtcatcaagggctgggaccagactgtgccgggccataacgtgggttcgcgtctggtggtttccattccgccggaatacggctacggttcccgcggcatcccgcaggccggcatcggcggcgaggacacgctggtgttcgtcatcgacatcatttccacccgctgaccataggtcagcacatgacgaacgccggggtcatagccggcgttttgtcataaataacgaagattgtttcagcatcgacaacggttcaggaggacgatatggctgaggacaaggtctacctgctgacgcaggaagcatacaacaagatgaaggaagagctcgcccatcgtgaaggtgagctgcgtgaggaaatcgcgcacaagatcgccgtggcgcgtgccgagggcgacttgtccgagaacggcggctaccaggccgcccgtgaggcgcagagcaagaacgagggccgcatcaccgagctcaccgtcaagctgcgcgattccaagatcatcgagaatgctccggaaggcaccgtgggcgagggctctgtggtgaccatcgagctcaacggcaacgagatgacctacgtgctcggcagccgtgacatcgtggccggcaccgactacgacatcatgaccccggattccccgattggcaaggccatcgagggcgccaaggtgggcgacgtcgtttcctacaccgcaccgaacggccgcgagctgtccgtgactgtcaaggccgccaagccgctggcctgagttaagtgactggtatgcccccgtaggcgggggcatacttatatgtcgtagcgcttattgccacagcgagacgatcaccatgtagatggccaccatatggcaggcatatccggccaccgttccgcagtggaaaatctcatggaatccgaagacgcgaggccaagggtcgggcttgcgcaaggcgtagacgatggcgccgaggatgtagcaggcaccgccggcgcacagcagcaccaccacggctggccccgcatacggcgaattccagaacatcaccatataagccaggccgtagatgccgaagatgatgtacaccaccgtatacagccagcgtggtgcattgatccagatcacatgaatcacgatggcgatggccgtgcacgcccacatcgatatgatgatcacattgcgccagaacggttccagcgcaaacgaaaccggggtatacgtgccggcaatgagcaggaagatgttgacatgatcgatacgccgcagcacatcggtgacgcgcgggctccaatcgcccagatggtagcaggccgaattggtgaacagaatcagcgacgctgtcatgaacacggcacacgcccacttcagactcgcgccatgtgccaagcatataagcacgatgcctgccgccaatgacaggggagcggcaatcgcgtgaatccagccgcgcatcaacggctttggccgtccgtgcacgtcgagacgaatcttgcgttccacttccgcaggggcaatgccctcgattttcagcgcacggttctccgctttggcgagcttgtgccgggccttctcctcggctttggctcgaatggcctcggccttgaactgggccttggcccgtacggcatcagccttggcctgcaacgcctgttcgcgcgcctcgatagccgcctgacgcttggatgcgatggtggcatcctctgcaatcgtcgcgctgttatgagcgtcgtgatgcatcgtcttttccgagtcgccggttgttgatgccatggtgatgcccccgtttcacgagttgacgatacgcttcttacgctgccgtaacctacgttagcgtaacttttatgcttgtcaataccgactcgcacgaacactatcacccaatggcggcgatactatggaatccgaagatgagaacgtcgcagcaataaagggctcggcgatggtgtattgcacggagtgtgggtttgccaacgagcaaggaaatgccttctgttcgcagtgcggaagcccattggagcagcccgaggccaatccggcggcccctgcttctcctgaacctcccgccgggcgtcctggcgtcgatcacaccaaagcggtggtgattgtgctcatcgcgctgatttgtgtcgtggcgttagtcatcggcttgttcatcacccatagcatgggattgtggggagctcagccgcaggcgcaaacatcggcacagtcgaccggggccgatgcgttggattccgccgatgatggcacgacggattcttctgacgccaagtccaaggccaagaagaacacgtctgatagcgccaaagacaagaacagcgacgattcgtccaagaaaagctcgacggagaagtcgaagccttccactccggtgatcacatccagccagttgtctgacatcgcggattcatactcgtcctccgatgtggccgtctccgccatggtcatcgatggaacatccgccgactcctcagaggacgccaccatcgcgaccacgtcgcagtccggcaagcaattcgtggctgccgatttctatctgccggtctatcttgcggcccaggacaatggcgatgacaacgccaaagcgcaggcaaacgcgatgatgggttccatggacacagcaatgccggcaatatggtggcggcttcggatatcaaactgtacgtgatgcttgccgtgtacgataagcaacatgccggcaccttggccacgggcgggaagccgtgcaacgcgattggcgcggtattgaagatgcgatgtcgtcatagtcgtcgtacttgcccgtgtggcttgccgcgacggcggcggtgcgtctgcgtatgatagggatatggctgatttttcacatatccttgcaacgcgccccgacttcgacgacgaggaccgcgagtggctgcatcatcttgtcgccgattggcaggtgatcgccgatttgagctttgccgatctgctgctgctggtacaggatggcgatggcaaatacgtggtggccgagcaatgccgtccatccaccgttatgacgctgcgggcggaagacgtggtgggaaacgtcatgccggacgacatggtcggcgaattggacgccgccatgctctccagcgtggtgttccgctccacggtattgagaaccgtgggcaaggcgaccgtctgcaacgtgtacgcgccggttcggcacaatggcaagaccttgggcttggtcgtgcgtgagaccaatatggccacacgagaatccaacggccgatatgagtcggaaagcatcaacgccggcaagcatctgtacgagatgattccgcgaggccaattcccctacaaggattcggtgatgagccaacgccatatcgctcgcgtggcggacggcttcatcatcctgaccatggacggcgtggttcgatacgcagccccgaacgccatcagctgctttaggcgtctcggtctgctgaccaccatgcctggccattacctcagcgaactcggcacacagctattgaaggagaacgaccctgttccggaaaccctgccgttggtgttgacaggcaaagccgcggtcgactccgaactcaacgccaaccgttccgccgtctcgatgcgctcgttgcccttgtatgacaacaacggccgtatcggagcgattctgctatgccgtgacgtcaccgagctgcgccgtcgtgagcaggagctgcagaccaaggacgctacgatttccgagattcaccatcgtgtcaagaacaacctgcaggccgtctccgcattgctgaggcttcaggctcgtaagaccaagtcggatgaggtcaagaaggaattgcaggaggcgcaacgccgcgtgcagaccattgccatggtgcatgagggattgagccagaccgctgacgaggtcgtcgacttcgacaaggtgatcgccaacctgctgcgcatggccgtggacctagccacgatgaaagaccagcacatcgatatcaactacatgggcaagttcggcatgatgcccgctcaggatgccacgccgctgtccctcgtgctgaccgagctcatcaccaattcggtggagcatgggttcgaaggccgcaaggatggccatatcacgatttccgtgggccgctccggcccgaacctcaatgtggtggtcgaggatgacggttccggtctcggctccgaagaacagggtggattggctcgttcttccggttccggtttgggcacgcagatcatcaacacctttgtgaccaatgatttcggtggttccgtgcattgggagccgcgccgcgaaggcggcacccgcgtggtgcttgatatgaagctcagggctgctcaggacgagtgatgcgaagcccgaaatgaggaaaccctcccaagcgggagggtttcctagtatgacgaagcgataatcaaaacatcagatttgcatctgcatggcctgagaacggcgggcgcgcatggcgcggcgcttcagcgcacgacgctcatcttcgctcaagccgccccacacgccgtaatcctgattggtgtccagtgcgcacttcaggcatgcgtcaatcactttgcaggtgcggcacacggccttggcctcctcaatctgctgataggctgcaccggtgttgcccaccgggaagaagagttccggatccttgtcacgacatgcggccttggctcgccaatcaaaagcgctgctcattgcttgcctcccttaaaagccccgtggctggtgttgttccttaagtccagtaccaaggtaaccacgaaccgtggtgattttcaagaggttttgccgagaaaaaaccgaagttttcacgaagcgcactgcaccagacatgccgatgtgccctcgatgagcacggcccggcccgcgttgtcggcatcgatatgactcatcatatccaataggcgagcggggactccggccataagatcggacgttctctccccgcacgggaacacgattctggtattgcaatgctccggtatacgtatcgggcgaatcgtgctgacggcgaataccacgctgacggactcatcggccaacgcatgtgtgaaagacagcgcctgctcgtcggtgcggaatgggtcgaacaactcatcggcgtcgtcgacgaaccacacgatatgcggaggcggtggtgcatccgagctggcatacggcgtgcagcggccgccatgaagccattgcgagctccatacccgacgatgcggggaactgacacgtaccgccaagccatcagccatgctggcgtgtcgagccaatgttttcagcaacgtggttttgccgcgcccctgcgggccgatgacaccgatattgccaccggtgagggataccgtcgcctctcgcaggttgatgccatcgtcggcaagtccaaatcgaatgcgttgcggtgcgtggtcggccacagtccggtcttttacgtgccgggggagtggcgcggtaaacagggacggttgcggcgggcttccgacgaaccgcgatgcgaacgcgatctggcggcacaccgcatcgatatcgcgtgccgttgcacagcggaatgccgtcacctgttcggaatcgttgcagaacgccgcaccgggcattgccggactgaggtcggcggcacgaccatcgccaagcagctcgcatgattgcagacggtcccgaacccgtaaacaaatgctgacggacatattcgccttcatatcggcactgacctgacccatgggattctgcgtacaggcgatcagatacatgcccagtgacctgccgagcgaggcaatacgcaccagacgattcacataatccgggagctggtccttcagggcatggaattcgtcaatgaccacgatcaggcgcggtggtggattgaccatatcgcggatatcggaagcatggacagcggcggacagctgttcacggcgtgtcagttcggcttccagcgcacgcaacgcgcgtacggcatgcgccagatccagatcgcatacgctgcccacggtatgcggcaaccgttcgagtttgcggaacgcggaaccgcctttgaaatccaagaacacgaaattcagatgctcaggcccgttcatcgaggcgagcgccagacaccagctttgcagcaacacggattttccggaaccagtggtgccggccaccagagcatgcggcccctgacggttcagatcgagcatcagcggctcgcttccggtcatgccgatcggcaccgcaaggtcaaggggttcaagccagcggcccacaatggcgcgccatggcaggcgtgcgaagtgcagcagcgattctatcggctgcgacggcgcatgacggaggtctgcggcgcggtcatcggcgtcgcccgtgataccgacatcgatcgttgcctgttgcggatcgggagccttctccgggcctggaggcgaggggagcgtcagcagcagggacacgagacaggcgaatatgcccggtgcgatcatggcggcgaacagccattgcccgtgcaacagcagtatgaccatcatcaatgcctgcgcgatcatcgggcatgccgcggcaaacatggtcaggcgggcgcgcaatggcggcgcgcccaaacggtgcttcgcccgggatacggcggatgccgtatggacggaatgtcgcttcgaatcgttctgctgtgatgtcatgcttccagcgtgggggaacgcatgccgaaagcgcaagccgaatcaaggtatgtggttctagcttgccgagttatccacatgacattttgcccgtgcatgattggcggtgtaggcaacggtgacgatcatgcgccgatgatgaagccgatgggctccgggaaagcgtcggtcagccttccgccagattgcccacggtgccggccttatacgtgccgtcggcaagttgattgaacagttcggtgttcttggcgtcgtcaagcagcaccgaggaaccaacgccatcaacgtaataatcggggtcggaccagtacacgctgccggagatgccattcgagccggtggcgcttttgaacgccaacgccatggtgagcaacgtgtaagggttggtcttctcgtccacggtgagtgcgctcatcgcggcattggacactgccacgattttggacggattggtcagggtctcactgctggaagccttcttgacgatggccgagatgacctgtcgctggcgttcgttgcgtccgaagtctcctcgcgcgtcggcatatcgcatacgagagaaggacaatgcggtggaaccatccgccgtatggcatcccgccttccagttcagtccggaataggaatcctgaacatcctcgtcatagcacagttcgataccgcccaaggcgttcaccacgttctgcagaccgccgaacttgatctgtgccacatgatcgattttctggccggtgatctgctcgacgttgcttaccaaagccttcttgcccgcaatcagcgccaccgcattgattttcatgtactggttatcgacgttcatgagcgaatcgcggggaatggaaaccaacgaactcggcccgcttttgggcttgatcagcaccagaatcgtatcggtcctgaagccagagatattgtctacgccgccgtaatcggtggaaccgtcacgctcatcggagccaagaatcagccaagtcgaggccggcgtgttgggggtgtcggtcagccagtcgctccgattcagtttgctgtccacccattgccaggcaccgaaaacggaaagaatcaacgccgccaccagtaccgcgattgcgcatagggtgatgcgtaaggctcgcggacggcgtgccgttaccgttttcgccgttgccgccgccggccggccaagatggctgaacttcgtggacacgtttgctgctggcgatgagggccgggaaaccggcatatccgacggattgcgcacggcgttgcgggatgagccggaagacatccgcgctcgcgacggcggaatgctgcgcggtgcggcggcatccggagccgtgctgcgagtggcgcgtccggttttcggagaaaaactgggcggagtccgcctgccgttgtccgcgacgttggcgcttgccgtggcgttggcgttcagttgaggctcttcgatgtcatttcccgtgacggacggacgggccgatggagcttgacctgactggcgcgaggttcgggcgggggcgaaggagcgtggcacctgcccggaaggccgggtgcgtcgatttcccgcaggaatgaagcttggcgggttgatatgcggatccgccccacctgattcctgcgtcataacccctcctgaaactgtcgattgtctgaatgacactttgacacagcatccgccgggtgttcctgcgctatggtgttcctgcgcaggaacggcacaatatcatgtgcaacggcgtcagggcatcgcgttcacgccatagcacacagttccataaaaatgatgtaatgacacgagaaagaatttgacaaaaccgaaattgcatgtgtgtaatttagtccgtatgaaaagctcaataggcaaggagaatcgcatgtggggtgtggtcgacgattcagccgaagagccatggcacgaattgtggggactattccgacctgatggcgatgtatcttggcagcacaaggcgttgtgcgcgcaaaccgatccggaggcgttcttcccggaaaaggggggctcgacccgtgatgccaaacgtgtgtgcgcaaaatgcgaagtgcgtgagcaatgcctgaaatgggccatcgaccatgatgagcgattcggtatttggggtggcatgagcgagcgcgaacgccgtcgatataagcgagagcaccgggagcgggcgtagctccacacacccccttcaagtctggtgcgtacactgggagtttatgagtccgacaggtaatagcgatattcatgaggcgttggccgacgccatgtcttctcgaccatatacgcataggcaggatgtggataccggcattacggctgtgatcaccgttgaggaggatatgcgtttcctccggtctacattgcgttcggtattgacgcagaatgttcttccgggggtcgtcatcatcgccgacgcgaccgggcgcaccagttcgaggataaccacctcgttcgaggtcatcccctcgccatcggggccggtgatggaggtgccgcagtccaagcatgtgaccattcacatcgtctcggccaagggcgcacgctccttcggcgatgcggtcagccgggcattggatcgtgccgatctggatgacgctccccgcgcattgtggctgctccatgatgattcccgcccttcggatgactcatgccttgaacgattgcttgaggcgtggcgcaatacgccgggcgccagtgtgctcgggtgcaaacagtgcgattgggaaggctcccatctgcatgatgtcggtatgtatgcgggtcaccacgccgtgcattccctggtggtcgatggagaacccgatcaggagcagtatgacgggcggcaggatgtgtttgcggtgtcgctggcaggcgcgctggtgtccatgtcgcaattcacgcgactgcggggcatcaatgcctggctgaccacctacagcgaatcggttgatttctgccgccgtgtctgcctgagcggcggacgcgtggtggttgtcccgcaagcggagatatcacatcgtcgcgcacggtatgagggcattcgtacgcgaggcggggaaccgcttaaggacgatcacacggtcaatcatgcgatgacggtgcatcgctcccaacagcggtatctgtacacggacctggccatgtcgtcctggtttatcgtctggctgtggaggctgctccgcagttttggcatggccatatccatgatgttcggcaagaagccgtatgaagcatgggtgcaattgtgcctgccatggctggccttggccgatatcgcgggaaacatgaaatcacgcagtctggtggccagacaatcgaaggtcgccgcatcgtccctgcatgtcttgttcgcagacagccagcagatcaagcagttccatgatcgtcgggatgcattccaatcccagcagggcagagtgctgctcagtccgctggaacgtgcccatctgcggacacgcaccatatatcgctggagtgcggccgtggtgatggcgctggtgtgctttgcggccatcgcggtgatgtattggccggtgttccgttcgatattctccggcggatcgttgtattccgatgtgttgcttcccaccggtgccagcttcacgcaactggtgcagtccgccaccacgccgtgggtgtttggcagcggcaccggcattcctgcgccgcccacgccgtggctgctggtgctgatgctggcctcgttggtcacgctcggccatgtgaccgccgctttggcgatgatactgtttgtggccgcgccgctgagcgcattgtcgttctgggcgctggcgggcgtattcacccgctcggacgtggttcgtgtgctgggaggactgctgtgggcatccaccggcattatgttcggctggtatgcgcaggccaatatgccgatgcttaccgtaatggtgttcctgccggccgcgttcgcattcgtgttccgtgccgtgggcatgtaccataccgaagacccgctcaagccgcgcacatccgttcaggccgcggccatcgccgcactgtgcttcatccctgtggtggccgctgaaccgcagctgctgttcgcgctgatcgtcgtgttcctgatgttcctgctattcgtgcgtcgcaagcgcgccatgctgttgctaattccggttcctgccgcctttgcggtggctcctacgctcgtcaatgcggtgcgttacgccgatttgggcatgtggcgtcaactgttcggcgacatcacggtgccaacgtcatccgccaacgggtcgccggcgtcgctgagtctgcttgaggccgcacagcgtgcgctgggatggcgaatggggtcgactgattatgccgatttggcggtcactgtgctgtttggcgtcatcacgctgcttgctcttgcttcgctggtgctgccgttcgcgttgcggacctcgcgactgatgtgggtggtaatcgtctgcggaggcgcgctcgccctggtctccagccgtgtggccataaccgtggatgccgatggtgtcgtggccggttccgcgcagccgggcatcgcgatgatgatattgggcttcctcgcctgcgtgtgtctcgtcgctggtggggcggtgaagcgattccaaccgttgcatgcgtctggcagtgatcccgcatcgaaaaaggaccgtctgcatgtgctcatcgtgtctggccgtgtggtgcttgctctgatactggtgtgctgcattggcatccaatgcatgtatggcatcgaacgtcataaggatgcgggactgggcgtgtctgaaaacggcctgcccatggtcaccaccgattatctggaggccggtgccgatcatcgtgtgcttgccgtgagcgcggagacccgcaacatcgtcaactatgcggtgatgcgcacctcgcgcggcgatttgatcgacagctctccggtccagcgggcgcgcctgctgtccggcaagcatgatgcggttgacgaacaactggcccaggcctgtgcctcgctgctgtccaatcccgacgaagaggccatcgcggccatcagcgcgcttggattcggcggcatctacgtggttcccgagaccggcgattccttgaacgacatgccgtatgaacagttgagcgcgaatatcgccgcatcgaacggcacccagtccctggtctccacggatagcggcagctactatcgtctgacgctgcgtagcagcgcctcacagcaggtggatacctcatggcagcaacgtgcacagcatagtgtctggaggcacgcctggctgatatgcctaggtgtgatcacggcgttgtactgcttggtcgccatgcctcgcagacgaccgtcctacggattggaggagcaggcatgagcaacaaaacttctggtttcaaacgtgcgatcggcatcgtgctcggtgtgatcaccatgctggtgttgattgcgctgttcgtcgttctcgtcatggcccccatccccaatatctgggtggataaggtggccgcttccgataatgccatcgaccagaccgttagtccgacccagtccgaaacctactgcccggcacctataggattggccgataccggcacgtacggcgacagcgccttccaggccactgtcggcaatctgagcacacaagcgcgctatgcggcgttcggctccgtctacagcgccactgtctcggcgatcgggcaaaagtccagttcagatgacgtaactttgaaagacgccgattcgaccgacgattcctcggtgaaaaccggtgctcagaagatcaatcagggagctcgtctgatcaatacccgtatgctgcaggccgcagctggcaccggcaccgtcggcaccatcgcatcatgggccgatgatggcgatgtgagaggcatatcggcggcatcctgcgtatcgacctcgctcagccagtcgttcctgctctccgacagcacgaccggtaccacacagcagctcatcgtctcgaatctctccaccaagccgaccaccgtcgacattgccgtctggggttccgagacagccgggaaaatggcattgtccacccaatccacgctgtctgtgccagccgagggggagtcctcgatggaactgtccgccgcggtcgatgggcagcatggtctgttcgtgaccgtttccagcaaggagactcctatcgcgtccgtggtgcgcacggtgaccatggatggtctgacaccgaagggttctgatttcgcgctgccgctgccgaccgcatccaatgcatcggtggcgccgtccatcactgccggcgatgcggtcaccgcttatctgttcgccaaggcagacaccagcaccgggctgtcatggattaccgccaaaggcttggttcccgccaaagatgccaccgtcactgctgataaagtgacggcgatcgacttgggagaagctcctgatggggcgttgggcgtgatgtccaccgcagaggacgccgtgtcgttctccgtcaaggccacacgctccggtgactccggccaagccgatttcgcattggtcaatgccggcgagccatccgaattctcggggttggcccttcccgacggagtaaaggcctccatcacgctggccaatacgtccaatgcgcgcaggacggtcaccttgcgcgcctacgatgatgccggtgcttcggtaacctccaaggaaatcacactggatgcgaacgcagcacaaacgattgaagccggcaatctttccggcgatcatggcaccgcggtcgtgctgatgttggaggactcatccaagaaagtgagctggggagcgcggttcagtcacgattcgttgcaagacaaggacatcgccggattgtccgtcatcgacgcttcaacgctgatgcccgccacggttcatgtctgggctcggaacgattcctccatcgtcaagtagaagggtatgctcgccgaagcgtcagtttgatgatgtttcggcggcgatatagctgcgggccgtgccactaccttattacaagtgacacggcccgcagtgttgtcacaggccccagtcggggtcgatttcctcgggcctgcgcccatacaattccgctatgcgggccaccagctcatccctgacggccaattgcagttcgagcttggtaggtgcctcggtctgcaacggcatgcggtagagcacgactcgtgcgggaatgccgtggctggcggggaagcactgggacgtcatattcggctcggtctgccaaggcgtcggatccgaaggcggcacatcctccaccgcgaactggagcggacgtatcagttccggccacgcttggccgagcctgcgaacctgggccgccaccatatcgtcgaacatgccggtgcgagtgcggtaacggggcagacgggtgccgaacatcggggttcgtgtgccgcgaccgtggcggttgcggtagattcgtgcgttccaaggtggctgaagcatggttcccaccatagggcatggcggaggcaacatgcgttaggattggttcattggctgtgaacattcgtcaacgagggaggcacgacaaatggtggtacgttcgtggtccgaacttgatttcgataatgtctgctccaacgccaaggtgttcggtttcgatttggacaacacactggccagctcaaaacagccgatgaagcccgcgatgatcgaacggttctgtgcgttgctcgaccatacggtggtggccctgatctcagggggcggcatggcggtggtcacctcgcaggtgctggatgtactcaccccgaatgccaggcgcggcaatctgcatgtcatgcctacctccggctcccggtattaccggtgggatggcacgcaatgggccttggtgtatgcgcatgatctgtccgaagccaccgtggccgctgtctcggaaagtcttgagcgacatgcccgggaactgggattgtgggaacagcaggtatgggggcctcgaatcgagaacaggggcagccagatcaccttctccgctcttgggcagttcgcgcccgtagcggccaagcaggcatgggatcgcgataacacgaagaaacaggcgctggtcgaagcggtcaaggccgatctgccgcatatgcgggtcagggccggcggatacaccagtgtagatgtcagcgaatgcggcatcgataaggcctatgccgtgcgcaagctgacgcagacacttggcatacgggccgatgaaatggtgttcgtgggtgatcgcatgacgcctacgggtaatgactatcccgcggttgaggccggtgcgatcggtgttcgtgttgagaatccgcaagatacggtacaactgctggatgcactgcttgcgcgattcgatactccagctcgatagtgacgcgttatggacgggccgagcgtatacaagtggtggcatgcgatgtgggcacaggtctgcaatctgctgtttccacgcggctgcgctgggtgtgacgcgccggatgaggtattgtgtgcggcatgctgggccctgttcgcgcaatgccgggaacgggatgcagacagtggtggcggagcccgtatatggtccgcatcgatttatcagggagcggtacgtcgtgccattctcgactggaaggaccacgacgataccgagcttgacggcccgttcggccgcatcatggtgtcgctgctgaacaagacgccaataccatcatcatgcttggggcatcgcgtattggtggttccggtgccatcatcgcgggcgtcaatgcgccgaagaggacgtgcccatacggcaccgttggccaaatcggtggcaggggcattgcgtgggtacggcgtcgatgcgcgaccatgcaatgccctgagctcctccaccaaggcacgctccgtgcagcaggtctcttcggcacagcgtgcccgtcgtatcaccggtcatgtcagggtgaagcgtgatctcatcggcaatggcgacgcggtgcttctcgttgatgatatcgtcaccacaggtgccactgtgcggcaatgcgttcaggcgtttcagcaggccggcaccaaggtggtgggcgtgctggtattggcggatgccgtggtgcgacggtccgatgacgatatcaacgggtgaatgacatcggtgacgatgccccagatagcaggcgaagcgccgttgctcggcatgtaatcggggtatcgcggattctcggcgtgcaatatggtgatgccggcccgtgaaaccagccgcttgatggcgatttcgtcgtccatgacagccgcaaccacatctccggggactggtgccaacgaacgatcgacaatcagcagatcgccgttgtgaatacccgcattgatcatggaatcgccggccatctgcataacaaacagcgtggcctcgtgcgccatggcctgtgactcggattgctgtgtcatgctgcgcctcccaccctgtattcgaacatctgttcgaatacagtatacggtaggacgtcggacaatatcagcgttcggcgatgtgatatttaggcaggatgatttcgaaatcggcacctcgcgtgtcgtcgaccactttgacggtgccaccgtgcaattgggccgcccagcgcgcgatggacaggccaagaccggtgccgcccgactcggtgccgggacccgtcttgcctttgacaaagcgccggaagatgtccaaacggtcggaaggcgcaatctgggagccgaaattcaccacattggtcacgatggtgccttggttttcgtcctcgtgggcgtcgaccagcacggtggtgccgtcggccgaatgtttcagcgcgttggcgatgatgttggtgaatagctggcgcaggcggtcctgatcgccttccatcgtgatgtcggccggcacggtgacgcggatgtcgtgggcgtggccaccatcggcgatttccaacggctcgatggtctcgtcaagaaagtcggcgaagttgaacttttcgatattcagactcgccgcaccggcctccatacggctcaggtccagtaggaaggcgatgagatcggagagacgctgcgtttgggtgaggatgctctccagattggtgggagtgggctcggtgacgccgtcggccatgttctcgaccatcgcctgcaaagcggaaacgggcgtgcgcagctcatggctcacattggcgatcatgtcgcggcgcattttatcggcatgctcgagttcgccggccatctcgttgaacgagcgagccagcttgccgacctcgtcatgacgatcctgatcgatatccacgcggaccgtgtaatcgccatccgccatggcttcggccacatcgcgcatctggcgtaggggagcggtgatgccgcgagagaagaaataggtgatgcccaaggccaccaccaaagtcagcggcatggcgatccaaccggaccagccgaatttcaggaggaaccagcacatggcaaacgcgatggcagtggcgataacgatcagtgcgctgagttccagcttcagagatgagaacaaatcaaccggcttgacgcgaggtttcatcgcatcaagccgggattgctgttgttttttggatgccatcacgcggtcggcggctcgaaagcgtagcccacgccatgcacggtgcggatggtatcggcaccgagcttatggcgcagcgccttgacgtggctgtcgacggtgcgggtgccggatgcgtcgacccagtcccagacctcttcgagcagcttttcgcgggtgagcaccgacttcgggcggcgggccagcgtggccagcaggtcgaactcggtgggggtcagatgcacctgttcgccgttcacggtgacgatgcgctgggccgggtcgatgaccatcgaaccgaagtcgagcagcttctcgttctccgagttcttggcgatgaccttcgcacgctccacgcggcgcagcagcgccttgcagcgggcgataagctcgcgcatggagaacggcttggtcatgtaatcatcggcacccgctcccagaccgatgaccttgtcggcctcgtcatcacgtgcggtgaggatcagcaccggcaccggacgttcggcgacgatgcgtttggtggcctctagaccatccataaccggcagcatgatgtccatgatcaccagatcggggcgtagctgggacgcggcctggacggcggaagcgccgtccccggccacgcgagcggtccatccttcagcggtgatgcgctgggcgatggccgtggcgagcgtgggctcgtcctcgaccaccagcaccgtgcgcggtgtcgtattctgacgcgctgtggtattgagcataaataaaccggttacctttcagcctgttgaccagttcagtcttccggcttcaagaatacaactcccagagccggaacggtgatcttcgccgagaacggacgtgaatgatattcgccctcgaccgcttcgaaggtgccgttgtggatgtcggagccgccgtacttggcgtcatcggtggtgaacacttcggtccacttgccgccggtgggcagcgccacctggtaatcggaccaggcctcaccggagaagttgaccaccacggccaaggtctcgcccttggtaccgatgcgcaggaagctcagcgtgttgtggtcggcatcgtcgctggtcagccactggaagccggccgggtcgaagtcctggctccatagtgccggatgcgccttgtagaaggcgttaaggtcggcgaccatggtctggacctgacggtgctcctgccagttcaggcaatcccaatcgatggaggcgtcgtgatcccactcgccccactgggccagctcgttgcccatgaaggagagcttcttgcctgggtgagcccactgataggcgaacatcgaacgcacgccggccagcttctgccagtcatcgcccggcatcttgccgtacagggaacccttgccgtacacgacttcgtcgtggctgatgggcaatacgtagtgttcggagtaggcgtacaccatggagaaggtgatctcgttgtggtgccacttgcggttgatgggctcctcgtgcagatactcgagggtgtcgtgcatccagcccatgttccacttcatgccgaagccgatgccgccggcggaagtgggggcggtgatgcccggccatgcggtggactcctcggcgatcaccatgacgccggggttgttcttgtacgcggtggcggtggcctccttgaggaagtcgatggcctccaggttctcgcgtccgccgtagatgttcgggcgccaatggccgggttcgcggctgtagtcgaggtagagcatggagctgacggcatccacgcgcagtgcatcgacgtgcaggtcctcaagccagaacagggcgttggccaccaggaagttgcgtacttcgcggcgtccgaagttgaacacataggtgccccattcagggtgttcgccgcgcagcgggtccgggtcctcgtacagcggggtgccgtcgaagcggccgagcgcgaaggcatccttcgggaagtgggcgggcacccagtccatgatcacgccgatgccggcctgatggaactggtcgaccaggtaacggaagtcatcgggggaaccgagacgggagtcgaccgcatagtagccggtgacctgatagccccaggagccggagaacgggtgctgggccagtggcatgaactccacgtgggtgaagccttcctgcttgacgtagtccacgagctgcttggccaggtcgcggtaggtcagtccctgcctccagctgccggcgtgcacctcatagatggagaccgggccatcatgcgggttggtggtgcggcggtgctgcatccaggcgtcatcgttccacttgtaggtggattcggtgacgatggaggcggtgttcggcggaacttcgtgctgacgctccatcgggtcagccttcatctcccacgtgtaattggcgttcaggatctggaacttgtaggtctcgcccgcgccgattccggggatgaagatctcccacacgccggaggagccgagctcgcgcatggcatgacggcggccatcccaagcgttgaagttaccgactacgcgcacggcatgggcgttcggggcccacacggagaatgcggtgcctaccacctgttcgccgggcgtgccgtctgcgccgcccatcggatcgtcatagcgcagcacatgcgcgccaagcgtctcccagagcttctcgtgacggccctcgccgaacagataggtgtccatgtcaccgactgtgggcatatagcgatatgggtcgtcctcaatgagcactgcgccgctttcccactcggtcctgacacggtagtcgggaatcgtgggctgcttcttagtgccggaagccggcacggtaaccacgaacacgccgttgtattcgtgggtcatcgggtattcgccatcctgggtgaggatggtcacggacttggcaagcggacgcagcacacggattgtggcggtgtcggcatgcttgccgatgccgagatgcccgccgagaactccgtgggggttgtagaattcagcattgctcgtcgcatcgaggtcgccttgggcgacaggcacggtgacggtatcttccttgatcttcgtttcttcagccatgtcccaaagtctacgtgcgttgaagtcgaaaacgctacattggcgcgtcgaaaatggcgaattcttgcccttttcgttgtgtttccgtggttgtgagcgctctcataggggtggtccagaccgcatggcataatcattcgagttttcgtgtgtaagccgtcagttctcggagggtacatgtcttacaaagtcggcgatatggtcgtctatccgcgtcatggtgcagcgaaggtggaggccattaccgagcggacggtcaagggagtgacgcgcgaatatctgcagttgtccgtactctcttccgatggtttggtcatcaacgttcccgtggacaatgccaagaaggtcggtgtgcgtgacatcgtctccgcatccgaagtggccaaggtgttcgacatcctgcggaccccgatcatcgagaaagagatgaactggtctcgccgttacaagctgaacgtcgaaaagatcgccaccggcgatgtcaacaagatcgccgaagtggttcgcgatctcgcccagcgcgatgtcgacgagcacggcctgtccgcgggcgagaagcgcatgctcaccaaggcccgtgccattctgacttctgagatcgccttgtccgagaagatcgacgaggcggaagcccagcgtctgctcgacgtgaatctgggctacgagcccgctcagcccggtgacgacaagcatcacaccgccgagcccgaagaggccgcggccgatactttggctcgtgttgaagccgagaagaagtccaagaagaagtgatttgattgttttgaggccccggtcgtgtccttatgcgatgcgccggggcttcgtgattcataatcgtttgctgccgttcgtctgggcaacgccatcgaaggggactgcatggggtctgtaggagtgctgatagggcaaggttttgacgctcaccgttttgcgcctgctggctcaggccgtgaactgtggattgccgggctctactggccggtgcctgattcatgcagcgaggccgatgccgccaaatacgagggtatcgaaggcgattccgatggcgatgtggccgcgcacgctctgattgacgcgttgcttgccgccgcccgattgggagacattggttcactgttcggtgtcggtgcggacgcgcatggtgccggaatgcatggcatcgatatgttgcaagaagttgtggcgcatctggcatccaacgggtatacgccggcatcggcctcggtggcgatcatcggcaaccgcccgaaaatcggcacacgccgtgctgaagccgaagccgccctgtctgcggcggttggttgcccggtatcggttaccgccaccaccaccgaccatatgggattcactggccgcggcgaaggcatcgccgccatcgccaatgccttggtggagaagatataacaaagcccccgctatgaattcgccagcgggggcaagaaaaaatggatgagattacttccgcatcgtcttcacggctttggcgatagcccagaacagggtggaaagcgtcacgatgatgaagctcgggggagcggggaacatcgccgacagcacgagtccggcccaaatcgacaccaagcacagcacgctggcgatcaccattgccttgaatggggagccggccagaatattggcggtggccgcgggcgtaatcaccagtgcgaaaatcagcaaggtgcccactgccggcacggcgatggtgatcacaccggccataatcgccataaacgccacgttcatcagcccgatcggcacacccttggcctgtgccacctgctcatccagcgagctgaacagcagcgggcggtagatgatggccaacaatgccagcagcagtacgtcgaacacggcgaagccgatgatctggccggtggtgatggtcaggatcgagccgaagaggatcgactgcatctgctgggaggcggaactcgacaatcgcgcgaagaacagacccaagccggtggcgaaggccagcacggtgccggtggcgatttcacgctcggaaacgcgcttgcccaaagcaccgatcaccagtgcgccgcccagtgcgaacacgcccatgcccagtgacacgggcaggccgagcaacaccgcgccggtcgcgcccggcagaccgatatgggccagcgcatgggccgcgaaggtggaacgacgggcgatggtgaagtatcccatgacaccggcggccagggcaatgcacaggccggcgatgaaggcgttggtcatgaatggagcggacagtgtatccagccattcgggatcatacgaaaagttgatggtgctcatgtctctgtattttctccatgcctgagctacagtccgttgatgggctgtgggtcggctcgcttgatgttatcgattctcggcgctgttggcggtactgccattggtggcattgccgtgctcgtgatggtgcaattgcgccacttcggctgccgtgtgcatatcctgcggctggtcctggagctcatccggcgtcggggtcacgaacatgtctccctgcggagtggtgaccacctgcacctgtgtgccgtagaggtgggtgagtaggtcggagtcgagcactttgtgcatatcggcgtagtgcgggtgaccgtcgagcaagtagacggcaccggtcagaatcggcaagagcatattgagatcgtgcgcaaccacctggatggtcatgttcagttcgcggttcagcttggccagcacgtgtacggtggcgcgctgactggccagatcgaggttggccaacggctcgtcaagcatcagcagttgtgggtcgcacaccaacgcctgggcgatggccacacgctggcgcaaaccgccggacagttcggacagacggtaccgcgccttgtcggcgatgccggtgaactccatcgcctcgagcgctttggctttctgggccttggtgatggggtggatgccgaatcgggtgccggtcaggcccagcaacacggattgttcggcggtgagattggaatcgacattcgccacatagctctgcggcacatatccgatgcgtttgttcatctcgcctgcgggcttgcccagcacggtcaggctgccatgacagagcggcaaaaggcccagctcggccctcatcatcgtggttttgccggtgccgttggtgccgacgatggccgtgaccgaaccggtgggaatggcgaaggtgccatgctgccagatgatatggtcgccacgcttgatggcggcatcgctgaacacgatgcaatcggaagtttcactcataacgcccgattgtggcaaacgatgctgacaatcgttctcaatatcgtgtacggatggtgataaccaaagagaagggttgtgcggccatctcgacaatggtcgcacaacccttctcatgcaaggcgtctattggcattggcacgaatccgatgccggtgtcctttgcttctaactatttgccggagtcggtctggtcgttgccggaggcatcgccgggatcgccattggcggcatcggcctttgccgaatcctgagatgagtcactggatgcggccgccttgcactgacggatgtacttggggtccgtgctggaaccggtgctggccttggagtcttgcgcattggcatcatccgtggcggagccttcggcgctggaatcatcggaattcgcgttgctgtccgcggtatcgccgtccgtggcgtcttcgcagccatagcttggatccaccgcgtcgatgatggtgttgatgagctggttgatccaggcgttcagcgtgtcggcgtccttgggcatttgttcggagacgtcgactaccggcacatcggcgcgaccggcagcgccagtgatcatattggtcgcgtcactggcttcctgcgtgttgttgaccagcacatccacgcccttgtcttcgatgagtttctggaaagactgcaggtccgcgggtgccggttcgccgccggaagcggtcgattgcgtataccccttgggcgtctgatctttgaacccaagatcggccatcagataatagaccacgggttcggtggctgcataggtgaggttggagtgggacttggtgaactcggacgcccatgtttccaacgatttctcgtccgcctgccatgccttgagccgcttctggaaggctttcttcttgctggggagtgcctttatatatgcatcggtgatggccgtggccatgctggatcgagcgtctttggagaaccacagatgcgggttatcgccctcgacggcacccatgacggaagcggcggatacgatattcgtggtcttggtcatcgatttggtggcccaggaatcgtagcccgcaccgttggccacgatgatttgggccttggacagcttggcgacatccgaggtctttggctcgaaatcgtgggcatccacattggtggagttcacgatggacgtgacttccacatcatcgccgcccagctcggcggccagcgagccccattgattgagggaggccaccacattgatcggcccggtcggtgcgggaacgctggtcttgttgtccggctcggtttcagcgggggaggtggctgcgcatgcggtggtcgcgaacaacaggacggcgctcaggccggctgcggcgagtcgcgtaagtcgtgtgatttgagtccccatggcacgccttcttcgtgagagcgaacgatatataatcctgacttgttccaacgatagcctatcgtttcgatagaatgcaccgaaactacaggggagggcgttgatgtccacaaaaatcgacggtaagcagattgcggccgaaatcaagaccaaccttgccgagcgagtgaacaagctcaaggcgcagggcatccaaccggggctgggcacgctgctggtgggcgaggaccccgggtcgatgaagtacgtggccggcaagcacgccgattgccaggaagtgggcattacctcagtcaagaaggaactgccggcggacgccagcttcgacgacatcgccgctgccgtacgcgaactcaacgaagatccggcctgcaccgggttcatcgtccagctgccgttgcccaagggcatcaacgagaacgcgatcatcgacatgatcgacccggccaaggatgccgacggcatgcacccgtacaaccttggcgaactggtgctgcatgtgcgcggcgacatttcgacgccgctgccttgcactccgcgcggtgtgctcgagctactcgacgcctatgacattgatctgaacggcaaggaagtgtgcgtgcttggccgcggcatcaccattggccgcacgattggcctaatgctcacgcgcaacgccgtcaacgccaccgtcaccctgtgccacaccggtacccgggatgtggccgaccacatgcgccgcgccgacgtgatcgtcgccgcaatgggttcggccggattcgtgacgcccgacaaaatcaaggacggcgccgtgctggtcgatgtgggcgtcagccgcgtctacgacgaagaagccggtcgctaccgcatcaagggcgacgtggacaaggcctgctacgacaaggcctccgcctacacccccaaccccggaggcgtgggtcccatgacccgagccatgctcctagccaacgtcgtggaaatggccgaacgacacgcctagagtttcctaggaaatttgggcagagttgcttgtattgtgagtatctgtatgcctgtagggtgtgcgtataactgaatatcgagaaattatccatccactattagaaaccatatatttacatggcagagaacaacactgaagtcaccaaggttgccatcaacgacatcggcaccgaagaggacttcatcaaggcagtcgattccaccatcaagaacttcgatgatggtgatctggttgagggcaccgtcgtcaagatcgatcacgacgaagtcctcctggacatcggctacaagaccgagggtgtcatcccctcccgcgagctttccatcaagaaggacgttgatcctgacgaagtcgtcgaggtcggcgacaccatcgaggcccttgtcgtcaccaaggaagacaaggaaggccgtctgattctgtccaagaagcgtgcccagtacgagcgcgcctggggcgacatcgagaagatcaaggaagctgacggcgtcgttgagggcaccgtcatcgaagccgtcaagggcggcctcatcgtcgacatcggtctgcgcggcttcctgcctgcctccctcgttgagatgcgtcgcgtccgcgacctctccccgtacatcggccagaagatcaaggccaagatccttgagctcgacaagaaccgcaacaacgtggtcctgtcccggcgccagtacctcgaggagacccagtccgaggtccgcgagaccttcctgtcccagctcaagaagggccagatccgtgagggcgtggtgtcctccatcgttaacttcggcgctttcgtcgatctcggcggtgttgacggcctgatccacgtttccgagctgtcctggaagcacatcgaccacccgtctgaggtcgtcaaggtcggcgacaaggtcaccgtcgaggtgctcgacgtcgatctcgaccgtgagcgtatctccctgtccctgaaggcgactcaggaggatccgtggcagcgcttcgctcgcacccacgttcccggccagatcgtcaagggcaaggtcaccaagatcgtccagttcggtgtcttcatctccgtcgaggacggcatcgagggcctggtgcacatctccgagctcgccaaccgtcacgtcgagaacccggagaccgtggtcaagccgggcgagaccgtgttcgtcaaggtgatcgacgtcgacctcgatcgtcgccgcatctccctgtccctcaagcaggccaacgactccgttgatccggcttccgaggacttcgatccggccatctacggcatgccggccgagtacgacgagcagggcaactacaagtaccccgaaggcttcgacccgaacaccaacgagtggatcgctggttacgagaagcagcgcgaggagtgggagtctcagtacgccgccgctcacgagctgtgggaggagcacaaggagttcgtggccaaggagctggagaacgctgccgaatccgcagccgccgacggccagggcccgaaggaagagaagccggtcgaggagacctccaactactcttccgctgctccggctaccggtaccctcgccgactccgatcagctcgccgccctgcgcgaccagctgctcggcaagtgagtttgccgcgaagctagcgcttagcgtttaaggaaacccggtccgattgggccgggtttcttgtgtttttggagttatccgccaatgactcacctcagtctcgctacgcgagccggatcccctccctgaggggagctgtcggcgataaccggccgaggggagcgccagctatcatgggcaccatgatgcgaataggactgaccggcggcatcgccgcgggcaaaagtacggtggcggcgcgactcaagcaactcggcgcgttgcatatcgactacgatgcgctggcgcatcagatcgtcgaacccgggggagtggcgctgccacagatcgtcgccgagttcggtcctgatgcattgctcgccgatggcactatgaaccggccatggattgccgatcatgtcttcggcgcgaacgccgcgccgggcgcacgtgaacggctcgacgccatcgagcacccattgatctatgccgaggcggcgcgactggagcatgagcaccccgaggcagccatcatcattcacgacattccactgctcgccgaggtcattgacgatattccattcgcctttgaccatatcgtcacggtcgaagctcccgtgtgcatgcggctcgaccgtatggtcgaggaacgcggcatgagcctggaacaggccgaggcccgcatccgccaccaatccagtgaggaggagcggcgggccatagccgatatcgtcatcgactccacccatccattgcccgagatgctggcccaagtgggtgagatatacgcaggatggtgcgcaggtcgctaagatgaggccctatgggattcaatatcgagcgcgcggacaagcctttcgtcgtcaaatcgccatataagccatccggcgaccagccgcaggccatcgccgaactggccgaacgcgtcgaaaacggcgagaatgatgtggttcttatgggtgccaccggtaccggcaaaaccgcaaccaccgcctggctgatcgaaaagctgcagcgaccgaccctgattatcgagcccaacaagacgctcgctgcgcagctatgcgccgaattccgcgaactcatgccggacaacgccgtgagctacttcgtgagctactacgactactatcagcccgaggcatacatcccgcagaccgacacctatatagaaaaggactccaacatcaacgacgatgtggagcgcctgcgccaccaagccaccgcaaacctgctgacccgccgcgactgcgtggttgtggccaccgtctcctgcatctacggcttgggcacgccggaagaatacgccggtcgcatgctcttcctcaaagtcgggcaggaaatcaaccgcgacgacctgctgcgccaattcgtggccatgcagtacaagcgcaacgacatcgccttcacgcgcggcaccttccgcgtgcgcggcgatacggtcgaaatcatcccggtctacgaggaactggccgtgcgcatcgaattcttcggcgacgagatcgaccgcatctccacgctgcacccgctgaccggcgacgagatcgacgaggaaaacgaagtccacatcttcccggcctctcattatgtggccggccccgaacgcatggaacgggcgctcaaaaccattcgcgaggaactcgaagaacgcctggcagaactgcgcaaacaaggcaaggagctggaagcgcagcgcctcaacatgcgcaccacctacgatctggaaatgctcacccaagttggcgtgtgctcaggcgtcgaaaactattcgcgccacttcgacggccgcgccgccggcaccccgccgcacacgctgctcgacttcttccctgacgacttcctgctggtcatcgacgaatcacacgtcactgtgccgcaaatcggtgccatgtacgagggcgatgcctcccgcaagcgcacgctggtcgaacacggcttccgtctgccctccgcgatggacaaccgaccactcaaatggccggaattcctgcagcgcgtcggccagaccgtgtacctgtccgccacgccaggcgactatgagatgggactgtccgatggggtggtcgaacagattatccgcccaaccggtctgctggacccgaagatcgacgtacgcccggtcaaggggcagatcgacgatctgctcgccgagatcaaggcccgtgtggccaagaacgagcgcgcgctggtcaccactctgaccaagaagatggccgaggacttgaccgactatctgctggaacgcggcatcaaggtcgaatacctgcattctgatgtggatacgttgcgccgcgtcgaactgctgcgcatgttgcgcgaaggcaagatcgatgtgattgtcggtatcaacctgctgcgtgagggcctcgatttgccggaagtatcgctggtggcgattcttgacgccgacaaggaaggattcctgcgctcctatcgttcgctcatccagaccatcggccgtgcggcccgaaacgtgtccggcacggtgatcatgtacgccgacgagaccaccgaagccatgcggcaagccatcgacgagactgaccgtcgccgcgccaagcagattgcctacaaccaggagcatggcatcgatcccaagcccctgatcaagaagatcagcgacgtcaacgacatgctcgccaaggaggatgtggacacccagaccttgcttgaaggcggctaccgcaacgcgggcaaggccggcaacacgcacctgggcgtgccggtactcgatcccaacgaggcagacaaacgccacgaggagatcctgaaggccggcctgcccgcgcaggacctcgccgacctgattcgccaactgagcgaacagatgcacaccgccgccgaacaactccagttcgaacttgcggcccgtctgcgcgacgagatccgagacctcaaaaaagaactccgtcaaatgacggaagccaacaagtaaccaaattcccatacccgaggcgggcagtcaggggatgcgttgtcgaccgtaaagacttggcctgagcggcccggagcgtgtcgaacaacacatcccctgactgcctggcgatcagcgctaccggaacggccccaaaaccgtcacatacataagttagtgtagggaatcatggcagaaaccccactcgcatttgaaatcatcaccttcgtggtgctcgcgttgttctttatcgtcgacctgttcgtcatcgggcgtcgaccgcatgtgccctccaccaaggaatgcgtgcagcatatcgccttcttcgtggttatggcgctgatcttcggcggatgcatctggttcttcgccggctccaagcccgccatcgagttctattccggctggctcaccgaatactcgttgtccatcgacaacctattcgtgttcgtcattatcatgtcgaacttcgcggtgcccaagcagattcagaagtatgtgctgtccatcggcatcaccattgctttgattttccgtggcattttcattctgatcggcgcggccctgatctcccgcttcacgtgggtgttcttcctgttcggtgccttcctgatctacaccgccgtcaaactggtgctcggcggcgatgaagatgaggaatatcacgagaacggcatcatccgtaatctgcgcaagatcatcaagattaccgacgactacgacggcgagaagctgcgcaccaccaagaacggcgtgcgttactggaccccgatgctcatcgtgttcctgaccatcggcaccaccgacgtcatgttcgctttcgactcgattcccgcgatcttcggcctgaccaaggatccgttcctggtgttcacctccaacgtgttcgcactgctcggcctgcagcagctgtacttcctgctgggtgctctgctcgacaagctcgtctacctgcctgccggcctgtccgtggtgctgggcttcatcggcgtcaagctcatcatggaggccctgcacggcaataccttgccgttcatcaacggcggcgaaggcgtccattgggtgccggaggtgcccacatggctgtcgctggctgtgattgtgctcgcaattggcggcgcatccgtggcttccgtgatcaagatgaagagcatggaaagcgctgaaaaggcctgaaatcgttagagaatacaacccttaaacccagtcaacacaacaatgtgagcgctcacaacacaccgtgaagaaaacttgtcatgagtcggctcgcgctagtagactgggtttcggcaaatggggcaatcgcgcctcgaaccaaattgaacaagaataggcaggcattcatgcgtaaagccaagatcgtagacaccatcggtccttccaccgaggattacgacaacctcctgaagctcgttgaagctggtatggacgttgctcgtctgaaccgctcccacggcacccccgaggatcacctcaaggtctacaacaacgtgcgcaaggccagcgaagccactggtcgcaacgttgccgcgctcgttgatttgcagggcccgaagattcgctgcggttggttcaagaagaacgccgatggcgaagacaaggttcagctgcagctcggccaggaattcgtcatcaccactgatgacgtcgagggcgacgagcacatcacctccaccaccttcaagggcctgccgggcgattgccacccgggcgacccgatcctgatcgatgacggcaaggtccgtcttgaggtcaccaaggtcgagggcaacaacgtgtacaccaaggtcgtcgtggccggtcctgtgtcctcccacaagggcatcaacctgccgggcgtcgccgtctccctgccggctctgaccgagaaggatgaggccgacctgcgttgggccatccgcaccggtgccgacatcatcgccatgtccttcgtgcgtttcgccaccgacatcgaccgcgcccacgagatcatggacgaggaaggccgtcgcatcccgatcattgccaagatcgagaagccgcaggctctggagaacctcgaagagatcgtcaagaccttcgacggcgtcatggccgcccgtggcgacatggccgttgagtgcccgctggaagaggtcccgctggccactaagcgcatcatcgagctggctcgccagtacgccaagccggtcatcgtggctaccgaagtcctcggctccatggtgaactccccggttccgactcgtgcagaggcttccgactgcgccaacgccatcctcgacggctccgacgccaccatgacctccaacgagaccgccgttggtaagtacccggatgtgaccgtggccaccatggcccgtatctccggctacgccaccgaccacggcttcgaccgtatcccggagctcaagaaccttgacatgtcctccaccggcgctgtctcctccgccgctgtggacctggccgacaagctcaacgccaaggccatcgttgcttacacccagaccggtgccaccgtgcaccgcgtctcccgtgagcgtccggccgccccgatctacggcctgaccagcaacgagcacacctaccactggctggctctgtcctggggcaccgaagccttcctgctcaaggaggactaccacgacaagtcccgcaaggatctcatggtctacacggacaaggtcctcaaggatgctggcaaggttgctgacggcgacaagatcgtcatcctgagctctgctcagggcgatcaccagccgggccgcactgactccatctacgtgcacaccgttggcgcttgcgactgatttcaggcttctggtagctgctgacagctagcatatagcacacgaaagcccccatccaaagtggatgggggctttcgttatctgttatgttgcgattgtgtggtgattgcaatggcccacagtcaccgcggtgatcgagcgtggcgatcagtcgttgagatgatcgagcgtgccgctcttcaggcgcaaaatggcgaccatggtcttggcatccacaatcgtgccattgaccaccatctcataggcatcgtccaccgacaccatacgcacgtcggaacgcggagtctccgggccgatttcctgacgggaagccggggtaagaccggtggcgaagaagattgcggtgtgctgggtggaatagctcggcgtgttcataaaacgggtgaactgcgtaagcttggtggcgtcgaaaccggcctcttcggccagcttgcgcttagctacatcggtcgggcgttcggacgggttgttggcgtgaccggccggaatctccaacgtccaacgatggttggcgatgcgatactgctcgaccagcggaatcatgccatcatcggtgacggccagcacagccacagtgtcgccattgttctcctgaacaaagtagcgttcaaacgaaccgatttgattcgactcataggagacgtgatcgacattgaaataatgcgtctccacaatctgtctacgggaaatctccttgaccggagaggggcgccagggatcgaactgacggtaagtttcgttgctcataagccctcctaacaaaagcgatacatcgaaactacagcccattgtaagcggtgaaaccacgcaggagaacgggcaacacacgggtgcgccgtccgcgatatcgacgtgtttcgcctgtttcaccggggggaatggaggattggcgcgtgtcttgtgtcgcaagagtcgaattggtatgctactctcttcagagtgctttggcacgccctcgtatcccaattggtagaggaagcagcctcaaaatctgcgcagtgtgggttcgagtcccaccgagggcactttagttaggagttcgctgaaattattgtgaaccccattgttgggtaattcaagaaagaggttggcatggctgcaaggaagaagtccgaagaaccgagtatcaacatcgatgaggtgctgaccgacgaagagctcaaggccgtggccaatgaaagcgaacctgctgagcgcaaggccaagcccgaggacggtccgcgtaccgttgtcgtggccgaggacgaagccgtgaaccgcatggatctggtcgccatgctggaagacaacggttatgaggtcgttggtcaggccgccaacggcgaggaagccgtggaactgacccgcaagtaccgccctgatgtggtgtgcatggatgtcaagatgccgcgtatggacggcatcaccgctgccggcattatctgcgatgaaaacatcgcccccgtcgtcatgctcaccgcattctcccagaccgatctggtgaagaaggccaccggcgctggcgccatggcatacgtcaccaagccgtacgaggaatccaagctgctgccgaccctcgaggtggccatgggccgtttcgccgagatcaacgatttgctggacagcgtggagcgcagcgaacgtaagctcaaggaaaccaccgatcagctcaaggaaaccgaagagaagctcaagaaggccgaagacacgcttgaggagcgcaagctcgtcgaccgcgccaagggtctgctgatggacaaggcggacttctccgagcagggtgccttccgttggattcagaagacctccatggaccagcgcatccccaagaagcgcctggctcaggccatcatcgccaagtacggcgatccgaagccttctgattcgggcgaacgctgattatcggcgtcgccgtactgagtcgtaaagcaacacaaacacactatgggagaggccagcgtgaccgtacccaccaatgaaacattgctggtggtggacggccactcgctggccttccgtgcatttttcgccctgccggtcgacaacttcagcacctccagcggccaggccaccaacgccgtctggggttttgccaccatgctcgcgcaggtgatcgatgcggagaagcccgaccatctgggcgtcgccttcgatgtgaagggcggcacattccgcaatgagatgcttccgcaatacaaaggcacccgtgaggcggctcccgaagagctgctcacccagctgccattgattcaacgcatgctcacggccctcggcgtcacctacatcgagaagccgggattcgagggcgacgatgtgatcgccaccctcgccaccatgggagacaaggccggctaccacacactggtattgtccggagaccgagacgccttccagctggtggatgacaacgtcaccgtgttgtacccgggtcatcacttcaaagacctgaagcatatgacgccgcagtccatcatcgacaaatacaaagtcactcccgcacaatatccggatctggcggcactccgaggcgaaaccgccgacaatattcccggtgtgcccggtgtaggcgacggctttgcggccaagtggattaaccaattcggttccctcgacggcatttgcgagcatgccgatgaaatcggcggcaaaaaaggcgaatcactgcgggccaatatcgatcaggtcaaactcaatcgcaaagtcaacgcactggtacgagacgtcgatctaggcgtcgatatcgaggatctgacattcggcaccgtggacgtggcacagatcgacgccctgttcaaggagcttgaattcggacctcgcaccaagagtcgtgtactgaaaaccttcaataccggggccaaggcatccaacacatccggagctggcgagtctacgaataatgagcagaacgagcaggatagcagcctcgatctgaacctgccggaacccacgagcatcactgctccggagcagttcgacgaatgggtcaaggcccatcgcgtcgaagtcaaggttcccggtgaaatcgccgatttcacggtttccgactatggcgatggctcgcagcggcatgccatctgcggcgacgcggtcggccacgcttggaccgtggccgcatggggcgacgaaaggccggggcgtgccacggcacaagccattgccgtggccacggcaacatcagcggccatagtgccccttccaatcaccgataccctgcgagcacagcttgcgcggttcctgaaaagcgaacactcccgcaccatcgtgcatgggtataaagaattgctgcatcttttgggcgcggtcgatcttgacatggacctgccgatgttcgacaccaagcttgccgggtatctggcccaaccggatttccatgccgatagcctcaagcaggcggccgagcacttcctcgacatccacttcaccgaaaccgaacagccttcgcaaggcacgttggacttcgacgacgatcaggtcgaagaagatccgaacgaacatcgtctgcgtgatttggccattatccgcagcctcgccgtcacgctcgggccgattatcgacgagcgtgaacaatgctggctgatgcgcgcgattgaacttcctgtttcccgcgtgctgcacggcatggagcacacaggagccaaagtcgatagcgttcgactcgtctccatgcgtgaccagtttgccgccgaggctcgccaagcgcaggaaatggcttgggagtatgccggcaccgaaatcaacctgcaaagccccaagcagctgcagaaggtgctgttcgaagatatgggtttgaaacccaccaaacgcaccaagtccggctcatacaccacgaatgcggccgcattgcaggatctgtatgtcaaatcagtggacaatgagcgggccaacggtttcctcggagcgttgctgcgccatcgcgagatcaacaagctcaagcagatcgtccaaacgctgatcgatgccaccaacacatcagatgagcgcatccacaccactttcgagcaaaccgttgccgccaccggccgattgagctccgtggatccgaacctgcagaacatccccaatcggaacgccgccggccgtgagattcgtggcgtgttcgtgccgggggagggatacgaggccctgatgagctgcgattactcacaggtcgagctgcgcattatggctgatctgtccgatgatgaggcgctgatcgaagcgttccgctccggagccgacttccacaaatacgtggcctcgatggtctacaagctgccggtcgaccagatcaccggcgaccagcgcagccacgtaaaagccatgagctacggattggcctatggtctgagcacgtatggtcttgcccagcaactcaagatcgcgccacgtgaagcggaagcgttgaaaaaccggtatttcgatacctttggcaaggtgcacgattaccttgaatcgctggtggccaatgcccgagagaaggggtatacggaaaccattttcggacgacgtcgctacttcccggccctgcattcgaccaatcgtgttgcgcgtgaggccgctgaacgtgcggcactcaacgcaccgattcagggatccgccgccgacatcatgaagattgcgatgattcgcgccgagcagaccttggccgaggctcacgtcaagagccgtatcattctgcagattcacgatgaactggtagtggaaatcgcgccgggagaaggcgaccaggtcaccgaactggtgcgcaacgccatggaacacgccgtcgaccttgccgtgccgctggacgtatcgtgcggcatcggttccgactggcaactcgctgcacactgacaatttctagctcccctcgggtgagggggctgagccgttgagcaaacagtccagtggattgtttgtaggcgaaggcgagccgatagtcgagcaatgaagagcacgagcatggcttgtccgcaattgcagaatgagtcccttgcagcaatagcccactacaatgggacatatgccgaatctcaagcaagtcatcgacgttctcgagaccctgtacccattgcgctacgccgaggaatgggatgagccgggcctcattgtcggcgatctgagtcacgacgtgcaccgcatcgtgttcgccgccgacccgacctccgccatcattgacaaggctatcgctactggcgcggacctgctcatcacccatcacccgttgttcttccgttccgtacacgagacgagcggactcggtttccggggcgacatcgtccgcagactctaccagcacggctgcgggctgtgggtagggcacactaatgccgacgctgcgtatcgcggcgtgggacaggcggcggccgactacttcggactcatcgaccagaaaccactcgtgccgattgacgatgcaaacgcctctcatccggtcggcttggggcgtgtgggtcgtttgccgaagcctgttgccctgaaggatttcgctcagcgagtattcgacgaagtgtccgatcatggcatgaccagcgcgctcggcatccaggtatgcggcgattcggacacttttgttcagtatgtggccattctgcctggctccggggactccctgttcaacgaggtgcgtgccaccggtgtggacgtgtacgtaaccagcgatttgcgtcaccacccggtgaccgacgccatcgaacaagcccggtatgaagcccgtatgagggcccaaggcatcatgctcggccatggaatggcgggggagagccatgtgcgtccctgcttcatcaacacccctcatgccgccatcgaatccatgtggttcaactacgcgatcgatgacgtgccagccgccatcgaacaagcgaccggagcaaggcctgaagtcgagtggttccacgacacgaccgatccatggacgctgtccattgccgcgcatcgagattaagacgctatagtaacgtggcaaaaacgttttttccgaggagatgacatgtctggcggaagcaagcaggaacaactggagcatcggctcgaccataagctgaacgcctcctcggacggcatcgacatggacgtgcccgccaaagtgatcagtagcgaaaccgtttataccgggcgcatcttccacgtggacgacatgcgcatcgctctgaccgacaagcagggcaaggaacacgagatcggccgccaggtgctgcgtcacgccccctgtgtggtcatgctcgtgcacgacatgtccaccgaccgttacctcatcgaacgcgaataccgtgccggatcggacatgttcgcctacgggcttcccgccggactgatggacgagggcgaggacatcatggacgcggccctgagggaactggccgaggaaaccggcgtggtgccggaccgtgacaccatgggcgttgacttcgtaggtgatttctactcgtccgaaggcatgaccgacgaactggcccacatcatggtgttgcatttgggcccgttcaggcgggagcagcgccatttcgatgcggacgagcatgtggaatccgcgtggattccgtggagcgaccttgccgccacgcgcatcacctcatccaattcgatgatcgccatccagcatgaggcgttacgcagactcatcgccaggaactccgacaaggataagccgtcgctgttctcctgacgttcaactccccggcacatcactgacacaaaaaaagtgggatactgaaaactatgcagatcagacctggatcaatgtatccgctgggcgccagctatgacggcgccggtgtgaacttcgcgctgtactcacaggttgcgcagaaagtcgagctatgcctgttcgacgagcacgatgtggaaacacgcatcgaaatgaccgaacggaactcatacgtatggcataactacattcccggcctccatcctggccagcgttacggctaccgcgtctacggtccctatgacccggtgcacggcctcagatgcaaccccaacaaactgctgcttgacccgtatgccaaggccattgaaggtaatatcgacggcgacgaaagcctgttctcatactggttcaagagcccggacgacaactcggcgatgaacgaccttgactcggccgcccacaccatgaagtcggccgtcatcaacccctacttcgattggggcaacgaccagcatccgtacatctcgtaccacgattcggtgatttacgaggcgcacgtgcgcggcatgaccaacctcaacatggacgtgccgccggacatccgcggcacctacgccggcctggcctatccgagcgtcatcgaatacctgaagaagctcggcatcaccgccatcgaactcatgccgatccaccagttcgtcaacgactccttcctgcaggagaagggcctgtcgaactactggggctacaacaccatcggcttcttcgcaccgcacaacgcctactcctcctccggggaacgcggcgagcaggtcaacgaattcaagtccatggtcaaggcctaccatcgcgccggcatggaagtcatcctcgacgtggtgtacaaccacaccgccgaaggcaaccatatgggccccaccctgagcttcaagggcatcgacaacgcctcctactaccgactggtggaaggcgaccagcagcactacttcgacaccaccggtaccggtaactcgctgctcatgcgctcgccgcacgcgctgcagttgattaccgattcgctgcgctactgggttaccgaaatgcacgtcgacggcttccgcttcgatctggccgccacgctggcacgccagttccaggaggtcgacaagctgtccgcgttcttcgacatcgtggagcaggacccgatcatctcgcgcgtcaagctcatcgccgaaccgtgggatctgggctccggcggctatcaggtgggcggcttcccgtccagctggtccgaatggaatggccgctaccgcgacaccgtgcgcgacttctggcgctcgcagccctccacgctgcccgaattcgcctcgcgcctgatgggcagttccgatctgtatcaggtcaacggccgtcgaccggtggcgtccgtgaacttcatcaccgcgcatgacggtttcacgatgaacgacctggtcagctacaacgaaaagcacaacgaagccaatggcgagggcaatcgcgacggcgagagcaacaatcgctcttggaattgcggcgttgaaggcccgaccaatattccggacgtcaacgacttgcgtcagcgtcagatgcgcaacatgttcgccacgttgctgttcagccagggtatcccgatgatttgcggtggcgacgaagtggcccgcacccagcagggcaacaacaacgcctactgtcaggacaacgagatctcctggaccaactggcatcttgacaagggacgcaaggaactgctcgccttcgtttccaaactcattcatctgcgtttggatcatccggtgttgcaccgccgtcgctttttcaccggccgtgagcccggcgacgattcgaacatgattccgcaggtcgagtggttcgaccacaccggctcgatcatggatatggacgactggcagaacacgcatgcgttctccatgatgatctatctgaacggttcggatattccggaggtggactggtacggcaaccggatggtcgacaacgatttcatcctgatcttcaacgcgcattacgagccgattatgttcaccctgccggatgagcgatacggccgcaaatggcagctggtcgtggatacgcacaacccggatgggccggaactgagctatgaggcgggcttcatgatcaccgcccagtcccgcagcttcctcatgctcatgagcgacaaaaagcccaagaagcccatgggcctataaccagaccgaatttaagctccctctgacgagggagctcccagtatagccgggtgagggagagaccgcagcaaagccgcgaactcctactcgcgccccttacgctcctccacgagccgaccatccccgaacgcaagtagatgctcgccggcaagcgggcgcggctggtcgagcagctcgcggaaatccaggattccatcgacttcgtcgacgccaaacagcgcttctacgacgacgtcctgtctggcgcaaccccatacgtaagcgtgctcatcccatccgcggcgctcgcaaaggagtcagaggaaccgggagaattgaagggggtggagaggaaataggttcgaccgagctgtttcttcctccgggatacaagcgcgaacaacggtttgttgtacccgcgcttggcgaacgggacatgcccttagactggaatcagcaagcgcacagcgagacgcgcgaatcgttttccgatgtcgggaggtagtcatgtcgatcggtcaggttatcaaagtcgtgcgcgaggagcgaggtcttacgcagtcgcagttcgcgcacgagctgttcgtcacccaacaggcgctttcccgctgggagaagggaacggcagagccgagcatcgacatgattcggctgatcagcacccgttttgaggtgccgatggcgaggcttatggagatgccggacaacggtttttgccaaagttgcgccatgccgttctatcgcccggaagatcacggcaccgaaccggatggaacgcgaagcggagattattgcaactactgctatgacgacggcgtttttcttcaggactatgccaatagcgatgaattggtcgccgcatgcgcgccgatgatggcggaatcctgccatatcagcgtcgaacaggccgaggattgcatgtcggcgctgctgccaaacctcaagcggtggcggcgtcaggatgagatcgatgcggtggcggaagggaaatgagcgatggcgttcgattataagaaggagtataaggacctgtatcagccgaagaccataccggccatcgtcatggtaccggcgatgcggttcgtcgcggtggacggtgtgggcgacccgaacgaagaaggcggcgactacgccaaggcgatgcaactgctgtacggcatttcgttcaccgtcaaaatgagcaagaagtcaaagaacccggacgagcatatcgacgggtacttcgactacaccgtgcctccgctggagggcttatggagcatgggggagggtgtgcccggcgtcgattacgcgcacaaagccgacttccattggacttcgatgattcgtctgccggaattcgtgaccgatgaggtctttgcgtgggccaaggcatcgtttgccgccaagcatcccgaagtcgacatcaatcgtgcatatctcttcgacttcgatgaaggcgtggtcgcgcaggtcatgcacaaaggcccgtacgacgacgagcccgcaaccgtgacgattctggacggctacgcgcgttcgcaaggctacgggctcgacttctccgacacccgccgccatcacgagatctacctatccgacccgcgccgagccaaaccggaaaatctcaaaaccatcatccgtcatccggtagtgaaggtgggttgactttcggcgaactgctcgaagcgctcaccgcgcagtagcgtgaacaatctgccggaatccttaccggggtcaaagagcgctaccaagaactcgataagcaaaataactagaagcacgggttcctctcggagagattctgcccgagcgaccttataaatccttgcgcgggtcacctttccctgtgcaggaagcatccaggctcatgtgcattgatgacgccgatggattgcagataggcgtagacgatggtggtgccgatgaatcgcatgccgtacgtcttgagatccactgcgatggcgtcggacagaggggatgtagtcatgcctgtctcgtagatgacgtgacggccggtgaaccgccaaatatagtcgtcgaaactgccgtacgacgtctggatatcccggaatgcgttggcattaccgaccgtcgcgacgattttgcgacggttgcggatgatgcccggatcgttcatgagttcggcgatcttgttctcgtcatagcgccggatccgttcgatgtcgaacccatcgaacgcctgacggaaacgcttgcgtttgttcagtatcgtctcccatgacagtccggcttggaaggtctcgagcaccagcatctcaaagaggtggtggtcatcatgcgacggaaccgcccattcggcatcgtgataggcaacatagacgggattgctgagattgcaccagccgcagcgtgggttcatgtcatccatgtgttctccctatgggtcgttggagacggtcggttctagatgttgattcgatgtgtgatccagtataaacggtgtgttcggatagcggtctggatgtgcggattgtctgaaccatatttgccggattgcaggtataaaggggttagttactgcggttgcgggtatttcggtactagttaggggtgattctgggctgtaactcgacaccttttacctgcaacccactcccgcccacgggattgcacaatcggttgcaggtattttggtgtcatttgaggttgggaagcggaaatcgatgtcgcatggaatcgaactgactagcaggtggggtcccaacatcacaaaagtcccttataccgcaaggccatataggttctacggtcatcggataaaaccggataaatcgtttagcggtcggataaaagaagaagcccagaatcgttgagattccaggcttttttgtttgtcgggctagccggatttgaaccggcgacatcctgctcccaaagcaggcgcgctaccaaactgcgctatagcccgatgcgccattaaggcacaatgaatcattataaacgacgctggatacattgcgtgtcgagcatatgaattcaaaaaaggttctggattctcttgatagcttatgagcgacatctttattcattgatgctctacaacgactaggtttggatctgcatcgatatccggcgcatccgctggactaacaaggaccgtgcaaacgatgtggcccccgacttcctgcgaggaagtcgggggccacatcgtttgcacggtggactatcggatcaattctgatcagatcagctcgaggtcgacatcgaggctgatcggcttgtccgccgggatatggtactgggggtgcaccggcgacatccaggaatcatcgccgccaacgcccatctgtgcggcaaggacgcgcaggaacatgtgcttcggcttcggcagctcgtcctggtgctgagcctcctcaagcatgaagctggagtacggcaacaggcttaccgcgaacggcgcggcaccatcggcgcggctgacgcgcatgccgtggccgtgatcgtcggtaatctcggcccaacgcacatcctcatggttgcccgtctcctgcggcatgaggtacggcgcatgatccgcgaaagcgttggtgctccacacgccgagcttggcgtgtttgcggtccaggtacgtctccgccgggccggtgccgaagaacctcaggttcgtgtactgcacaggcagcgtccattcgatgccgaacgccgggatggtgggcaggtcaccctgctctccagggtattcgacgtgcaggttcacgcggccatcggtgtgggccgtgtaggagacggtcaccttggtgcgctgcgcggtggcgagctcatacgtgtacgtgcccttgagcgtgctgtcgtcgatctgctcgagcacgttgtccacgcagcgggcgtagcggccggcgcccagccactggacgcgctcgaaaccgtgaccggcgccgcgatcgttgtcggtcagcggacggaaggtggtgattgcgggacggcgcagcacgaactcgttgccggcgaaggtataggagaccatgccgccctgggtgcgcgacagcaggacctcgcgtccggcgcctcgcacgccggcgttccaacggcccacggtgatggtcccatcggccggcttcgtgtcgggcgtcgcggtggcgtccgcgggcaccacggtctgtccgaaggcgagctcgtagccgctttcggcccaatcggtcgccttggcgagacgctgcgaaacctgcagcaccagttcgcgggcgtcggcgcggtacgccgccaccggccatgcgacatcgaacgtgcgggtctcaccggcgggcacgtcgaaacgccgggtggactgccagaccggcttgccgtcggcgagaacgctcaggacgaacacgtagtcgccggtggcggtgaacaggttgtcgttcttgacggacaccgagtccttcgtcacgtcgatgtggacgttcgagtacagctgcttgacttcctgggccttgggggaaggcttgcggtcggcgaacagcaggccgtcgccggagaactcgtagtcggacggacggtcgccgaagtctccgccgtagcgcaggctcctggtgccgtcgggctgggtggcgtagatggcctggtcgatgaagtcccagatgaagccgccctgatacttcgggtagcgttcgagcgccgtgtattcgtccatgttgcccacggagttgcccatggcgtgcatgtattcgcaggagaggtacggcttcttcgggtcgtccttcaggtacttctcgatctcgtcggcatgcgagtacatacgggtctcgatgtcggtgacgtcatcgtagtcacggttgtgggtcacgccctcgtagtgcaccggacggttcgggtcgatgtcgtgcacgtgcttgtacatggcgcggaacacgtcgcccacgtaggattcgttgcccagcgaccagatcagcacgctcgggtggttgtagtcgcgacgcatcatgctgttgacgcggtcgacgcaggcgccttcccattcgcgcttgctacccggcacgatggtgtcctcggtgaggacgtctccgggcagggaccagctgccgtgggcttcgaggttggtctcgtcgatcaggtagatgccgtactcgtcgcacagttcgtaccagcgttcctggttcgggtagtgcgaggtgcggatggagttgatgttgtggcgcttgcagaagaccacgtcatcgatcatgtcctgctcggtgatggcgcggccgcgttcggcgtcgaactcgtggcggtcggcgcccttgaacacgatgcgcttgccgttgatggtcaggatgccgtcctcgatgcggaagcggcggaaaccgaccttctgggacgtgcattcgatgacgtctcccgcctggtcgatgacgtcgacgtcaagctcgtacagcgtcgggctttcggcgctccaaggggcgatgccctgcagcggtccgctggagatcgcggtctgcgcctccgcgtcgcccgtcgtctgccacaccgtgttgccgtcggcgtccttcagggtcgcgcggaccgtggccgcgtcggccgcgttgagcacggtcagcgcggcatcgagggaggcggtgccggcctcgggatcccaatcggcttcgatctgcgtgttctcgatgtgcacatgcgggcgggcggcgagttcgacggagcggaacaggccgtgcagacgccagaagtcctgatcctcaagccaggaggcgctggagtattcgtagcaggcgacggccacgacgttctccccgtcgtgcagcagttcggtgatgtcgaactcattgggcgtgaagccgtcctcgccatagccgacgaacgcgccgttgacccacacgtagatcgccgtggccatgccgtggaacacgatcgacaccgatccgccggcctgcttggcgtttgccacgggggcggagacggtgaacttcctgcggtagagcgcgacgtgattgttctccgggatgttcggttccaacgggttctcgtggccgtcccacggatactggacgttcacgtacttgtggttcatcagaccggccgtctgcaggtggcccggaacctggatacgctcgaacgaggagtcgtcgaacgactcggccgtcgcgggttcctcttcgaggttgatgtcggcggcctgaacgacctcgacccgccactcgccgtcaaggctctgcttgagatcggaccattgtccgctctgggggtcgcgggcgtaccacttgtggctggaatgggccggagtccggttcacctcgaacaccgtcgggtcggtcagccaagcctgcgatgcgcgatcgacatgtgtgacgtctgtcatgctctcctgctttctgtcattacctcgttgtgaatgatattatggaagaggccggggcctcctttaccgaaaaggataaacagtttttatataaaacgcaaatcctgtttaccgcttccaaatcactggcactgcttgccgtcgacgctacgccgcgtccatgcaatgtctcggttcagctcatgttatcccatccttgcgacacgctgtttatctccttgtttactaatgctttttactttcagtgataaaacttgtatgcttacggtgataaaacttgtatgctatactttgcaaaatcaatgagtgattccatgctctgggttcttaaggagaagattaatgagcaacgaaaatgccgcggtcggcgacgtccgcaggaagggcgggttaggccagcgcatcgcctacgcgtgcggcaacttggggcaggctgccttctacaacgcgatgagcacgtacttcgtcacgtacgtcaccagctgcctgttcgtcagctacagcaaggctctagccgcccaaatgatcgccgtcatcaccggcctgatcgtcgttatccgcatcgccgagatcttcatcgatccgctgctgggcaacctcgtggataacaccaccaccaagtggggccgtttccgcccgtggcagttcatcggcggactggtctcctccgtgttgatcatgctcatcttctccggcatgttcggactggtcaacgtgaacaccacgctgttcatcgtgctgttcgtcatcacgttcatcgtgcttgacgtgttctactccctgcgtgacatctcctactggggcatgatcccggcgttgtcctccgactcccacgaacgttccacctacaccgcccttggcaccttcaccggctctatcggctacaacggcatcaccgtcatcgtcatcccgatcgtcagctacttcacctggacgttcaccggcgccaagggccagggccggccggatggacctccttcggcttcatcgtcgcgctcctcggcctgattaccgcctggaccgtcgcctttggcaccaaggaaagcaccagcgcgctgcgtgccaaggcccagaagaacggcaacccgttcgaggcgttcaaggcgctgttccagaacgaccagctgctgtgggtcgccctgtcctacctgctgtacgccatcgcaaacgtcatcacgaccggtgtgatgtactacctcttcgtgttcgtgcttgacgagcctgccgccttctccatcaccggcatcatcccgctgatcgccggattcatcatggcgccgctgtacccgattctcaaccgctggattccccgtcgctacctgttcaccggcggcatggtctccatgattatcggctacacgatgctcgccctgttctccagcaacctgccggtcgtcatcgtcgccctgatcttcttctatgtgcctgcgcagttcatccagatgaccgcgattctgtcgctgaccgactccatcgagtacggccagctgaagaacggcaagcgcaacgaggcggtcaccttgtcggtgcgtcccatgctcgacaagatcggcggcgcgatgtccaacggtgcggtcggtgccgttgccctcgcggctggcatgaccggtcatgccacggcagccgacatgaccgcgtccaacatcgccacgttcaagaccttcgccttctacgtcccgcttgttctcatcatcctcagcctcgtcgtgttctggttcaaggtcaagatcgatgagaagatgcatgcgcagatcgttgaggagctcgaagccaagctcgcttccggcgagatcgtcgacgatgaggcgcaggcagttattaagaactgatctcccgttcccatccctcccataaggcccgtccgcctgaaccgcaagatgcggtccgtggcggacgggcctgttcgttcctgcggtcggcggtcatgaacatacccatgtcggttccggcagtggggccggaaccggcggcgtgtcgactatcggccaggagtgtttatcagctagtatcagctggtatccgatatgggccgtggccctgcgccgcctgccaaaggagataaccgtgcgtgcatgacgtgacttcgtatggccaaaactgctgaccgtggacggacgcggcatcgctttcggtggcgactatagtcccgaccaatggccggaggaaatctgggatgacgacatccgcctgatgggccaggccggcgtcaacaccgtggcccttgccatcttcagctgagatcgcctccagcccatcgaagaccattgggatttcgactggctcgatcgcgtcatcgacaagctcggtgacgtgaccgtcgccggaccgcatgtgcaggtgcttgcctcgtatgccggcgaagaagcggatgagtgggagcttgacggcatggccgcgatcacccgcaacacgtacggcgaaggggaggcgtatttcctcggctgcgatctgggcgtgagcgatctgacgcgattcgtgggaggctggcttgccgcgcagccgcaggatggccggcagccggaagccaacctgcggtcgcccgccagcggcgtgacctctgacgttctgcacaccatgcgtcaatccgacgacgccatattcgacttctatctgacacgtggcagatcggatgtcgaactgcgcgacatcgcaggggagccgatcgtcctgttccgggcggaacggggcagtgacggcggcgcgtatacggtgcatcgcaatggcgttttcgtgacgaagcgcccgaacccgtcggtgtagtcagttgcgacgaaacaggagggcggagccgcggacggttttgtgagacggtccgcggcctcaccgttggaagccgcggactcggatcatcagcaacggacgcgtcgttgatttccacttccggagcaacgatggtgagctttgccgtgacgagatgctgcaggacggtgccgacgtacatggtgcccggattctcccttcgccgctgcgctgcctgccgcagcagatgttccacggccgcatcaacggaaagcgagttgtcggactccagcttgaatggtttgctggtgaagaacgcctgaattcgtttgacccagtattgctcgatctcggtgaattgctctgctgtcggacgtaattcattgatgagctcggcatagtcatgcatcagcgccatggtgccgcggctggttcgtcccttaaaggttgaaccgatagaaccgtcattcattactttttcaacgataccgacacgctcattcgattgtgtccaatactgctttctttctgcatgaacaacggtactcggcaaggcggtaacgatagtcgcaaaggctaagaagcccgtacataatcgtttttttgtagtgtttcagattttcagtagaatggcgacagccaaatcccgctggcttgctagtaaagcgttgtcctcggggggagttttgtttgttgttgaaagataacgcggcatcgaatagataggggaggcccggcatgggacgtcatcagcgtgcagaaacctccggactcatctccttcttgatttgcgccgtcgttggcgcggtatcgatgaacctgtacatggaatacgcgccggccatctggcagctgacgcaacgccgattcatggtatgttcgggcatcgtggcggcatgcggcgtcatttccttcattattggctatgcgcgcaaatcacgttcattgaacctcaaacatggttggtttgcaccgattcgtcgcattttcgaaatcgtcgccctttcggtggtgtatgcctcgaccattttcctgtcgtcttttgcactcatcggtgcggccaacgacatgatgggcaatgccatcttctccggctatatctccagcgtctgcgccgccttcgccggcgtggtggggtacatgacctttgtacaggcggagatgatgaacgccaaaactattgccagtctgttgccgttcttcgtcatctccggcgtggtcaccgccggcatgaccaccgacgacccatactggtatcacaacaacttttcgcagctcggcgacagaaccacgtttgcggcccgtatgttcaactccacgctgattcttgccggcacatgcatcatcatcgtcagctacttcgccatctccgaactggtgaccaccgaacggctacagcgcctctggcacgaccgcaccaacagagatccgaatcgcggctacgaaatcccacatttcatgctgcgcatctccattctgtccttcctgctgatggtggccggcctggcattcatcggcatcggcgtgtttcggtacacgccacacaatctcttgcacaatatatgcgccaaaggcctgccgttcgtcatgctgctgctgttcgtgctcctgccgtggcttgcgccacgcctgtccaaagcagtgatggtggcctccgacctgaccgcgctcgtatgcgctgcattctgggtcaatatgatgatgggtcacaacaccctcaccaatgtggaggcgttggctggtctggcgttcctcggctggttcatcgtgttctcgcgccagatcgccgccatcgaggccgatcgcgcggccgctcagttgttgcacgcgcaggccatcgaaggcggttttgagcagccgtcttccgcacctgatcagcagatcgaatcccgcatcgctgccgaccggtgaataatttgtttgatagatttggccttatgactgaacgactcacgaatctctggcctgccccgctcgccgcacagccgttgaacgctacggtaacggtgccgggcagcaagtccctatccaaccgctacctgattctcgccgccctcggcagcaagcccgttactctgattggcctgctgcgttcgcgcgacacggaccttatgatgggcgcactcgaagccctcggtgtccgctgcgacgtggattccgcaaccgacaccaccgtaacggttactcctcctgtatccggccgattccatggcaacgtcaatgtgttctgcggactggccggcacggtgatgcgtttcgtgcccggccttgccctgtttgcagatggcccagtgaattttgatggcgacgaacaggcttatgcacgtccgatgaagccggtgcttgacggtttggaacagctgggtgcaacggttgattaccacggcgaggttggccgtctgccgttcactattacgccgcctgcaaccttgccggctgcccaggcgcaggtcagcatcgattcgtccggttcttcccagttcatctccggcctgttgctgattagttccaaactgcctggcggtctgcacctcgcgcacacgggggagaagaccccgagcctgccgcacattcgcatgaccgtggccgatgtgaccggtgccggcggtgcggttgaggccgacgaatccgcccgcacatggacggttgaaccgcgcgcaatgcaactgtcgagcaaggtgaccgttgagcccgatctgtcgaacgcggcgccattcctcggcgcggcattgatcgccggcggcacggtccgggtgcctcattggcctgaaaccaccacccagccgggcggcctgttgcccggatatctggagcagatgggtgccgaagtatcgttcccgaccatcggcggcgtgcgctattgcgaggtgaccggtgacggcaccgtgcgtgggctgggtacgttcgatttgacggcggccggggagattgcgccctcgttggcggcgattctggtgtttgctgataaatcgacagacatggttggtattggtcacctgcgcggccacgaaacgaatcgtctggaggcattggtcaacgagattcgtcgtgttgggggagcggctgaggaattgcctgatggattgcgtatcgaaccggtgccggcggagacgttgcacggtgccgtgatggaaacctatgctgatcaccgtatggccacgttcgccgcgatgctggggctgcgtattcccgatatcgaggtcatcaacgtggccaccacgcgcaagaccttgcctgatttcgtcggtatgtggagtggcatgctgaggcagtaaggggtcctgtgttctggtggaactcccctcagtccgccggaggcgactgagggggagtatgacgcaggggtaggggtctcatgaccatatacgaatgggggctgattccaatcggaatcagcccccatagtgttgcaactagagattggtgagatgcctaacggcggttacttacttggcgaaggtgttgccgtaggtgtcggtgccggcttcggcgattgcggcggacttgcgggcgatggccagctcttcgttcgtcgggatcacggcgatgatcacggaggagtccggagtggagatgatgcgcggttccttggagcgggtggcgttcttctcctcgtccagcttgacaccgaacggagcgagcttgtcgcacaccatcttgcggaccacgtcgtcgttctcgcccacaccagcggtgaaggtgatcacgtcgcagccacccatctggtaggtgtagttgccgatgtagctgacgatgcggtgcacgtagacatccagagccagcttggcgtcctcgttgccttcggacaccagacggtgaacctcacgcagatcgccgtagccggtcatgcccatcatgccggaacgcttgttgaacagggcgtcaagctcgtccacgttcatgtgggcgttgcggatcaggtggaagaccacagccgggtcgatgtcaccggtacggccacccatcatcaggccctcaagcggggtcagacccatggaggtctcaaccggcttgccggagacctcagcggaagcggaagcgccgttgccgatgtgcagaacgatctgcttcaggccttcagccggcttgccgatgacgtccggcaccacggaggagatgtactcgtgggaggtgccgtgggcgccgtagcggcggatgtggtactgatcggcgatttccttgttcagcgcgtaggtgctggcggccttcggcagctggaagaagaaggaggaatcgaagacgaagatctgcggaacgtccggcagcagggagcgcatgacttcggcgcccttggcctccgggccgttgtgcagcggggcgagcacagccagatccttgacctggttgatggtcttgttggtcacgagggccggcttcgggaagatggagccaccctgcaccacacggtggccgacggcgacaatgccagcctcagacaggttcgggccgtactcctcgaagaagccgagcacgcgcttcagaccctgctcgtggtcgtgaatcggctcttcaagctcgtgcttttcgccgttgtactcgtgcttgtagtggccgtcgaccggctcaccgatcttctcgacgaggccggaagcgaggccttcgccggattcgagatcaaccagctggtacttgatcgagctggagccggaattgatgacaaggacggttttcgccattgtgggcatcctccattgtgattgaatgttcccgtgagacacgggttaccgttgattagattactcgttgcttgctacaaaataagcattacggtggctcccgctggcgggagccaccgggagccaagccgggctcactgcgcttcgatggcggtgagggcgatggtgttgatgatgtcctgcaccagagcaccacgggacaggtcgtttaccggcttgttgagaccctgcagcaccgggccgatggccaaggcgccggaggagcgctgcacggctttgtagccgatgttgccggcgcacaggtccgggaagacgaacacgttgacgtgtccggccacatcgttgcccttggccttggtggcggccacggtgggggaccaggcggcgtcgaactggatggaaccgaccaccggcagatccggagccttctccttgagcagcttggtggcttcctcgaccatgtccacgtccggtcccttgccggagccgagggtggagtaggagagcataccgaccttcgggtcgatgccgaaggcacgtgcggtctcggcggactgcaacgcgatttcggaaagctgctcggcatccgggttgaggttgatggcgcagtcggagaacacggccacatggtccttgaagcacatgagaaatgcgccggagaccagcttctggccgggcttggtcttgatgacctgcagggccgggcgcacggtgttggcggtggagttcacggagccggagaccaggccgtcggcgtagccgagcaccacgagcatggtgccgaagtagctggcgtcggccagctgcttgcgggcctgctcctcggtcatgcccttcttggcacgcaactcgcacagcttggcgaccatgggcttcaacacgttctcgtcgtccatagcctggaagcgggcgcgctccaagtagttcaggcccagttccttgccgcgagccagaatggcgtccttgttgcccacgatgatgaggttcacgatctcgcgctcaagcaggtagtcggccgccttgatgatgcggtcctcctcgccttcgggcagcacgatggtcttcttgttgctcttggccttgccgagcaggccgaactggaaggcgtacggggtgatgggcgcggtgacgtccacatcgagcgcggcgagcacttcatcggtgggagcgttcttacggaaggtctccagcgccagatccttggtggattcatcggtgaacggcacctgcggcagagtccagaccggcaggccgtacttggcgagggtctccttaacggagaaagcgtggcgcggctcgcatccggtcacgaagatgccgagcaccttgttgccagcggcctccatgccctcgatggacagcttgacggtctcgtcgagctcgtgcggccaacggtcgatggtgcacacggctaggaacacgccggccttcagatcagcggcgacattcgcgtcgaattcatagctggtcggatcgttgacgtgggacttgtcggtgcccacgatcagggcggcgtccgcgcgggaaacgtccatggcatcgttgaacgcgccgacgatatcgccacgggcggtgtccttatcctcgcgcaccttgtgcacatcgaggccggtggacagggccacgccgagtccggcattggaggcggcgagcaggatcggggtgaattcgtcatggttggacacagcagggcggaacaccatggtcttgtacttggaagtcaatgcgttgagcatgccgtaagcgacgacgttgcggccattggcgccttcagggctggcgatatatacacgggtgacggtcacgatgtttttgtctcctttgataatcaacacgatagggaccacacctcattgtagtggcgattactgttatcgctcacgccggtgtcgcgccaatcggaagagcgtccccttggcgacgctttccggggaatgttgcgcaaaagtcggccgataggccagaaaacgagaaaggccggtgcatgaagcaccggccttgattgtggagctagggggattcgaacccccgaccctctccatgccatggagatgcgctaccagctgcgctatagccccgagtgaagctatccgattcatgggagtcgcaagacccgccatgaaccagcggagaaaccaccatatcgcctgatttgatggcttcgtcgtggagctagggggattcgaacccccgaccctctccatgccatggagatgcgctaccagctgcgctatagccccgttttcagttgttggcccgttgtttggacctcgtatacattacgacgagatgtcgattctggcaaaagccggcgtgtcgccaaatgacaaaagtgggatttggcgacactttttggcttgtctccgccattattcaggcattgggttattcaattactgcttgaacggtttttcgaatacactgaacctgttggctcagcaggggagccgtgacacgatcagcgttcgcgttcccactcgtcggtgtcggcgatggccggaccgtgattgtagtccagcagacgccagcgcacagtgccatcgggattgtccatcggcaccaagcgcacccagtgcgcattacgcaatgaaaccaccgtagaaaaggtcggatcgattgcagaaatgcccaacagggtctgcaatgtctgcgcaatccatgcgccgtgcgagaacacgaacaggtccgtgtcgtctccggcacgcgtggaccagtcctcaagagcctctacgccgcgcttgcccacagcttccttgggctcggcaccatacttcagctcgccgccccgagactccatccaggaacggaagtcctcggggtagcgttcggccagttcggccacggcatggccatcccaatcaccgaagctgcgttcacggacgcgacgatcatcgacgggctcgattccacccaatacgtcggcgaaagcttgcgcggtggcgtgcgcacgcttcaaatcggagcagacaatgaaccggtggttgatttccggccgacgatcgacgtacaggcttttcaaggccgcggcggtctgcttgacctgccattcacccacggcgtccagcggaatgtcgacctggccttggagcttgtgagcggcgttgtaggaggtacgtccatgacggataaggaaaacggaacgaacatgattggtcatagtgacgatcctttcggttccagtgaggaaacaggaaaaaggggagggctgcctggtgccgtcaatgacgttcggcaacaggcagcccgacacgcgaatatcagcgaatatcagcgttatgtgattcgcacgttacgcggtggtgacggcagcatcttccgcatgctccgccgtttccgggtgtgcgagttcaagatcgatggccgggcagtcgcgccagagtcgttcgagcccgtagaattcgcgcgattcctcgtgcatgacatgaaccacgaaatcaccgtagtcaagcagcacccactggccctcggtcaggccctcgcgcgagcgcggctgtcggccggagcacttaaggaacaggtccttttcgatttcctcggccacggccagcacctggcgctcgttggaggcgccggcgatcatcatgatgtcggtgatgccgagcaggtcggctacgtcgaaggccacgatgtcggtggctttgatacggtccgcggcctcggcggccacgcggacggcgttgatggaatcctgaagtgcgggcatggttcagcgctcccaggcgggcttccagccctcgacgttgtgttgcgtattctcggagtagaccatcgtgtcgctcggcacggcgtggcgcaccacggaaccggcgccggtggtcacattgtcgcccacttcaaccggggccacgaacaggttgccggcacccacgtggcagccggagccgatggtggtgctgttcttgtgcacgccgtcatagttggcggtaatggtgccgccgccgatgttggtgtggtcgccgagctgggcgtcgcccacgtagctcaggtgcggcaccttggtgccgttgccgatgtgcgccttcttcatttcgacgaacgcgccggccttggcatcctcgccgaactcgttgcccgggcgcaggtaggtccacgggccgatgttcgtgcgtgcgccgatgtgcgattcctgtacgcgggaacgctcgaccacggcaccttcgtccacggtcgcgtcggtcagggtggtgtacgggccgacgatggcgtcctcgccgaccaccgtgtggccttgcaggaaggagccgggcaggatggtggcgtcgcggccgatctggacatcgtcctcgatccaagtggtttccgggtcaagaatggtcacgccgtcgcgcatccagcgctcgcagacgcggcggttgtaggtcttggacagcgcggccagctgcacgcggtcgttcacgccttcgacggtgagcggatccggagcagcgaacgcgccgactttgccagcggccttggcggtttccagcgcgtcggtcagatagaactcaccctgcgcgttgttcgacttcagtccggcgattgcctcggtaagcacggaagcctcgaacacgtagactgaggtgttcacttcctgcacggcgagttcgctgcggttggcgtctttctgctcgacgatgcgcagcacgttgccttcgcgatcgcggatgatgcggccgtagccggtcgggtcatcgaggatggtggtgagcacagtggcgccgttgccggaggcggtgtggaattcgaccagacggtgcagcgtctcgctgtcgagcagcggcatgtcggaggcggcgatcagcaccgggccatcgaccttgccagcctcggtgagctgcgccattgcgcactgcacggcgcggccggtaccgggaatgtcgtcctggttcacaatggtgacctgctcgtcataggagcgggcggcttcggcgacgcgctcggcctggaagtgcacgaccacggccagcgtgtcgggattcagggcggccaccgaatccatgaccctgttcaggaaggtcttgcctgcaaaagcatgcagcaccttcggcttgttggaacgcatgcgggtaccctcgccggctgcgaggacgatggctgcggataatgccataactgacgtattcccttcgatcggaatgtctattgagggtggaaacacctcaaaacaatagacggccgcccggatgtcgagcggccgtcagccgttcccccacctggactcgaaccaagacaaagggttccaaagacccgtgtgctgccattacaccatgggggagtcgtgggctttcggcccacaagtgttcatttataccatattgtcggtatttaccgaaagactacgccatgtcgcgtctcgcatcgtgtgctttccacgaacaaacacgcacgtgatcaggcgaacaggaagccttgaccgtggtgctcggggtaggtgtcgaacagttcggcgaccgagccgtcctcgaatacggcgcggatggcgctggccagcagcggggcgatcgacaggacggtcaagccatcccagcgcttttcctcgggaatcggcacggtgtcggtcagcacgacctcgcgcgcaccgcagttcttgagtcgctcgacggccgggccggagagcacgccatgcgtggcgaccacggtcaccgacttggctcccgcgtcctgcagcacgtggcatgcgcccgcgatggtaccggcggtgtcgatcaggtcatcgacaagcacgcagtccttgccggcaacgtcgccgaccacacggttggcgaccgcctggttcgggcgggtgatgtcgcgcgtcttgtgcacgaaagcgagcggaccgccgccgagacgctgcgcccactgctcggccacgcgaatgcggccggcgtcgggggagacgacggcgacgttgtcgagatggccctggaaacgatcacggatgtagtcgaccagcactggcatggccaccagatgatcgaccgggccgtcgaagaagccttgggactgcgcggcatgcagatcgaccgacatgatgcggtcggcaccggcggtcttcagcaggtcgaacaccagacggcaggagatgggctcgcggccgcggtgcttcttgtcctgacgggagtagccgagcaacgggcagaccgcagtaatggaacgggccgaggcgcgcttcaatgcgtcgatcatgatgagctgctccatgatcgccttgttgatgggcttgtagtggctttgcagcacgaacacatcggcgccacgcaccgattcagtgtagcgcacgtacatctcgccgttggcgaaatcgtatgcggtggtttcaaggacgtcgatgccgagctgctcggcgacatcctcagccaacttcggatgaatccttcccgtaacgagaataagattcttatcgggctttccttcaaggattgcgctcaccatgtctcccaacgtgtggtctcgttgatgcagtcttcagcatagccgttcttcacgaccggttggacaactcagcgttgcctgccgttcacctgccgcttgcgatccattgttcgatggtctgtctgaccgcctttgcatagatatcgctatccatgctcgggtggatgccgtcggagccgagcacctgcgcgttcgcgttggctgtggcatcccaatccaccagcaccacattgtccggatgtgcggccgcatagtcggcaagcacctggttggtaggtggaatccacgtacggtctccgtgggcattgaccagtaccagcacgcggtcggggccgatcatattacgaatctggtccaactgatcgggggtgattgccgaattggtgccaaggccgatcaacacccactgccgcagactgccggcggacagagcgttgccgatgagttcgggggcgaccatgatggagcgggaaacgctcgcgtcggtctgaatgccggggaagacttccgaaaggccctgtgatgaggccagcatcaccgaatcgcctatggcggtaatctgatcgccggtgggcatctcatgcttgggcttgggcggtgccggcacggcatggcgcagcagcacgtgttcggttttctgcatacgttccagttgtgcggcctgttgctccagctggatctgcatggcggttttcgcaggtgcatgagcaatgccctgcacgcagccggccaacgacagcaccaggataacgtcaacggcaataacccgggccacatgattcttcttgttcgtgcgaaggggcaccacgacggataccgccgagtgcgttgccgccggtttctccaccatcagccaggaaatcatcaccgcaatggcggtgagcaacgcggtcatgatgagaggccaaggccctactgccttgaagatcttcggggcaagggcgctggaaagaatccacaacggccagtgccacaggtagatgccgtacgaatacttgccgagggaggccaatggcttgaacaccatgaggctttgcatccaggaatcgtcggagatggtaccggcaatcagcagcacggacaacaagctggacaatatgatgccaccgcggaaggcgaatgcatcctgtttgccgataaccgccatggtgaccaaggcaatcaggctgaggaacgccaataccggtgccgccgcattccagatgcgatgctccacgggaatctgaggtaacggagcccgatgtgcggctgccgaagcgctcgagctaatggtgcggggcatcggcacagccctctggcgagcgtggcccaactgaggagcggtgacccaccaggcgagagccacacccagcatcaggcccatgctgtgggtatcggtgccgaagtagacgcgggtggggtcgcctttgggcacatacatcacccacatggcgatactgctgaacgccgcgagtcccagtgggatgagtgaagacagtttcgtctggcggagcttccacatcagccagacgatgaacggcacgatgacgtagaactgcatgagcacgccaatgaaccacagatggcgaaacacctgcgggttcatttggtcgaaatagctttggcctccggcaatggcgtaccagttgtagcagcccagcagcacggtgatgacttggtcgcggatggaaactagaatgtcgtgatcgaacagccagccgacggagacgatgaccggaatcagcagaaacagcgccggatagagacgtactgcacgcttgggaatatatcgcacgagattcagcgatccggttttcgccagagaacgaatcaaactgacggcaatcaggaatccagagacggtgaagaacacgtcgactccgtagaatccgcctggcagccgttgctgcatgcagtggtacagcacaatggctatcagcgctagtcctttaataccgtctaaacccacgaaccgcttcacggataatccttctctttccgtagtgctgatggcattccccgttctctccaacaaacggaaaacaagcccagcatggccgaggggagagacaatgcgacagcagcgaatcgtcaggccgcatgctgcatgattaccggcttgacgattcgcggcataccgcgcttatcggtggcgcttaccggtgatacagactcacccgttcgtacttcggttcgcagcacacgttgatgccgagtttgcgatacagcgcctcgtccgtggatgagatgataacggagaagaaggcgtcgcagccccgcaactgtttgagcccgtcgatgacgcgagcggccacaggactggtggcgctggtgattgacaatgcaatcagcgtctcatccgagtgcaagcgtcggttcacgctgttgagatgctcggttttcagccgacagatgggttcgatggcggcatcgtcgattaccggaatggtttcgtcaacaccggtgacggccttgagcgcgtgcatcagcagcgcgctggccgcgcccaacaggtcgccggttttgccggtgaccacatggccatcgggcagcaccatggcaccagccggggcaccggtggcggcttccttctcaagggccacggcgcgggcgggagaaagatcgggggtcacgccggcccggttcatgatggagcgcagccgctccacctgttcctcgccagtgccggtgcgcttcaagtgcacggcggcggcgaagtagcggcgcacgatttccagacgcgcggcatcgcggcaggcatcgtcgtccacaatggcgtatccggccatgttgacgcccatatcggtggggctctgataggggctttcgcccatgatgcgctccatcatggctttgagcacggggaatgcttcgacgtcgcggttgtagttgacggtggtctcgccgtacgcctccagatggaacgggtcgatgatattggcatcgtcgaggtcgacggtggcagcctcgtacgcgatgttgaccggatggttgagcggaagattccagatggggaacgtctcgtatttggcatagccggcgtcgatgccgcgctggtgctcgtggtagagctggctcaggcacgtggcgagtttgccggagccagggccgggcgcggtgaccacgacgagcggccgggtggtctcgatgtactcgttcttgccgtatccgtcgtctgaaacgatgcgttcgatgtcgtgcgggtatccggcgatcgggtagtgcaggcggcaggtgacgccgagttgctcgaggcggtggcggtaggcgtcggcggcgggctgattggcgtattgggtgagcactacggagccgacgaggaagccgcgggaacggaacacgtcgatgagtcgcagcacgtcctcgtcgtaggggataccgaggtcgccgcgggtcttgcctttttcgatatggttggcgttgatggcgatgacgatttccacatcgtccaccagactttccaacatgcggaacttggtgtccggctcaaagccgggcagcacgcgcgaggcgtggtagtcgtcgaagagcttgcctccgaattccagatagagtttgccgccgaattgcgcgatgcgctttctgatgttggcggcttgcagctcgatgtatttttcgttgtcgaatccctggcgcatagaggtcggcatccctttccgaacgacgtcgtaaacggaaaaattataccggacgtcgtcggcaacaaaaaatgggattccccgatggggaatcccattcgtcatagagagcaattactcccgaggaatgttgaacaggggtttgcatggctcccaaaaacgcgctggttgaaacgttgccgacgacgcgtgcgctcgaagagtatgcacgggtggctttgcggtgatttcccagaccgttcgttgctaggcgagatatttctttttccaggccttctttcgggcgtaagcgttttctgtcatgtcggagtagtcgtaatcaactttgaacttgccgttggaatggagaataagcgtcatcgatccccatctcttttcgggcttaagcgcggccctttcaggttcaatgaacttgttgatagccataaagtttttcatcaaggatgccctcgaaacgcctttttggtcaaagcatttaacgaagtcgtcttttccgctgccagcaacgtaatactcaatagagaacgcaccctcggcgtactcggcgtaaaacacgaccttgctccagtcttcggggagggtttcctcaagaattgaagctatcccttgtagcatcttcttttcactcattacatttcctttgcagtgttaagaagaaacgtaaccgtctcttcgccgtcaataatgtccgtgatagcaaacgagctaggcctgaatgacccgccctcataaagtggctcaaccttgaaaaacacttcagcgccatcagccaaagcatcggcgcatttttgctcgattgctgcataggctttttggttaacctcgccgcccatggcgacaatattctcaaggccatttgatccattgaatcggtcggcaatcagatggcctctttgatcaaaaagctcttcaaacccttttccgattgactggatagtgtccttgatggtcaaacgaccttcgtgggtctttagttgtaagaagccttcggccgattcgaccctacccattgcatcggtaacgtatttatacccattgatctcatagctcatgttcggaacgaggtcgtcgccaacgcggtaaagttgcccgagatcgtcggttgcacacttcacgccgtcgatcgcaaactcgttattgggaagcagtcggtcgccttcgtaaattgcctttccggcatcatccagaattcgtgagcttgcgcccgattctgctgcctttgaggcaagaaagttatttagacctcgtccggcaagaagcgttgctgccgtaacagttcccgcaacgacttctccgacgatatcctcctgagatatctcaccgtcttcagcgccggcttccaagctctttcccatttcgtcaagaacgagtacagacccagcagcgagtgctgcaggggcagaagcggtgacggctacggcaccaagcgcaacttcagtggcgatttcgcctccagtttcgacatagtctccgatttcccgtatctgctcatcggcttccatgaagtcgccccaggcgttggctgcatcgtcaacagcgtgtgtttgcgcggttttcaccgctgcttcttcgtcttcggccagtagttcaatattcgattcaacaccgacatatgcgttttctccaacgtcggcaactccaagtacgaacctgccgccaagataagctccgttccttgcgccatcgcggacagtttcgcctgcagcgttgagtgttggctcgcatgctttccaggcgtcatctgcggcttcttgaactgttgaaatgctcgcggttaggacatcgccggaagaaatatcccgccatgcggcatctgcacaatcagcaacggtgcgttgcgcctcctcaaaggccaatctcgtttcggtcgtatccggcattaattgctctatattttcaaacgccatttagatcaccggccttgtttgagataagaccgctgatacttcggcgagtgctgaggccttttccgttgtctcgatgccggtacccctctttctcagctcgttgagatgagcgttaagcatcgactgaatgaacaggtattggattggtccccagctttcgggtgaggagtcatcttcgaatttccagcttgaaagcagatgggagcaaagcctctctttgaggctgtcggcagataaatccctggcgtcgtcgaggatgcgtccaatattgaaatacctataagcacaccattcaaacagtggcttcctcgaggacagaggagtccttgccatctcaatcaagcgtgccttcatggagtcaggtatgtccatcttgtgcacacagtcgcagaagttgtattcccttggctcatcgagcttgaacggattaagcacacaagagttgagatagcgaagctcttcagaagaagccttgtccttcgcgctgtgcttgctctgtgtcggcgagtactctaggccgcgttcatgcggttcgatgtgacagaggacaggttcgatccattcgttctgatatattgctgcaacgcctcgctgaagctttgcaagctcttggatttggctctcgttaagatttgccgccttgccgataagcatcctgtcgccttcgtcaggcagtttccaggataagtcgatgcgatgattctgcctcaagcccagcgggttgttaagacgcggtcattttggcgcttacatctcacttttgcagacgtagaatacgagtattggaatcaaaggagggttctcatgccaaatatcggtaaggacgaccatccgaagctgtggtcgcttattttcgtgcttatcatcgcgctgaccttctgttgcttcgtcatgggccaaggactcaacagtggaaccagcgtctttctggcaggccaaggttacggtgcgagccttgccggcgtacttgcactcgtcttctccattgccgccgcgttagcacgactgttcgtcggccctgttatcgacaacggcaagtgctcactcgttatcatcgccggcatcgctatcctcatagcaggaacagcactgtccgctgtcgttcaaggcatccccctcttcacaatcagccgtttgctgcaaggcgtgggctttggcgcagcaacaacagcagcctcgaccgccgcagcaagcgtcttaccgcaagaacggctcggcgaaggcattggataccacggcctcggacaggctatcgccatgagcatcggcccagccttcgcactttacctagtaggaaccgatccctcaacgaacctctatgtcggccttgccctggttgggtttgcagggcttgtaatcgccctcaacgcacgctatgaaagtaaatggcaaactctgccaagctccagcgcataccgaatcaaaatggaaacccggctcgaactcgactcaaaagacgggcaggcacccagccccaccacagtaactacatccgaaacaattaacagtgaaaagtatcctgaaggcgaccaggtgtccaagagaaccctgcgtgactcattcaacatcttcgagccgcgcgcattgcctggcgccatcccacagatgatcatgtgccccacttttggctttggcgtcttctttgctggtctgtacggtactactctcggctatacccacgccggtctcttctacaccatcagcgcggtaagcatgattatcattcgcatgatttcaaagcatttcatggacaccgtacctgcaatcaaaacaatgaccggagccgtcgcgtgcggcatcctctgctgccttatgctacttgccgcaccgtacggggaacctgtcttcctggcgtccggaatcttctatggtctcgccactggcataagcctgccacttaatcaaagcgtagcggtaaagaacaccccgccagagcgctggggcgccgcaaacgccctgttcctgctcgccaatgacatcggcattggcttcgcaagcgtaatctggggcgttatcaatgactcattcgggttccagacaagcatcgtctgcgtcattgtctgccttatcgcaagctacgcatccgcctggatcgtctaccccgcccgcgacaagcggtggaggcattagagcgtaagcgtcaaaatgaccgcgtagcaggaaacgtccaggaccattccggcatacggatggaaaagtcctggacgtttccatctttgcgttgcggtatgccttaggccgctatgtcgctacaggccctcctcggcgttgttcgccatctcgtcgtcgaacgcatcggggtcgatgttaattatgaagtcgtcaggcatctctttggccttctcggcagcggctgggtcgagcttgcaggactcaggcaccctatccgaccacggcaggaacgagtccacaacctcatcggtgagctcgccggcgttgggcatctcggtcagcagccactcgacgtaaagcctgggattgagcccgttggccttggccgtggtggtgacgctgtatatcgccgcagacgcccgcgcgccgcgcggcgcatcgctgaagagccagttcttgcgccctacgacgaagattcgctgggcctgctcggcgacgttgttcgagagctccaggtgccccgtcttcgagcacgttcatgacgtagggccagaactccacagcgtactgcagcgcacggtgcggcgccagcttcggcgaggctaggggaagctgggcccgcgcccatcccccgaagtcctccatgagcgggcggagctccgcgtcgcgggcggccttcctgccgcccggctccatgtcgtcgaacttggagtcgaccttgaacatggcgtcgatcctgcgccttgcctcgagcgcaacgctggccgcagacgccgccttggcgtcgccgccggcgatcttcacgatttgggcgaagtagcggcgcacgtggacgaggcacgccgtgttggcgatgttggggttgccgagattgaagtagggtttgtagccgttggcggtaagcgtgccggaccagcccgcaagaaactcctgggcaacgcccttcctgcgggtctcgtggtattcgaatacatacacgggcacgttgcagcgcgccgagcagaacagccacatcctcgatttcttcttcgcctcgcggttcggctctttcaggacctgaaccgtggtctcatcggcatgaatcctgacatgcgacagcagctcgaccttcattctctcatggaccttcgccagccagcgcgcgtgcacgttcatcatccagttcgccatgtcctggcgcgatatcgtcgcgccgcacgccttgaggtctgcctctatgcggtagagcggcagcgacatgacgtacttgccgttgacgatccaggcaagcagtgacggcgtcgcaaacgagcctggtatcggcggctcaggctgcggtgctcgcacgatgacgcccttgcgttcctattgagtttcacttgagtttcaggggcgtttttggggtggtgggacaaactactgggacagttcactctccgaaaaaatcctttactcttcgtccgctgcgtgtcgccatgtccgtggtgtacgcgcttttagagtaaaaatgactgaaactgcaggtcaaaaggcataaagagaccccctgaaaacgttgtttccagagggtctcaagagtttttactcacccaaaatcacaggtggctttacgctttttcgtacgtggcggcacactgcgacactctacggacggaatttcgattgtgcaaaatccgctccagtctactcccactcaattgtggccggaggcttgctcgtgcaatcgaggacgactcggttgatctggcggcattcgttggtgatgcgcgtggagatcgtggcgagcacatcgtaggggacacgggaccagtcggcggtcatggcgtcttccgagctcaccgggcgcagcacgatgggggagccgtaggtgcgctcgtcgccttggacgccgacggagtggacgtcggcgagcagcacgacggggcactgccagatgtcgcggtcgaggccggcgcgggtgagctcctcgcgggcgatggcgtcggcctcgcgcagcacggcgaggcgttcgcgcgtgatctcgccgatgatgcggatgcccagacccgggcccgggaagggctgacgccagacgatttcgtcgggcagaccgagctcggtgccgatggcgcgcacctcatccttgaacagagtgcgcagcggttcgatgagctggaacttgatgtccttgggcaggccgccgacgttgtggtgggacttgatgttggctgcaccgtcgccgccgccggattcgacgacgtcggggtagagggtaccctgcacgaggaacttgacttccttgccgcgcgcgccggcctcttcaagcacttggcgctgggccttctcgaacgtgcggatgaacttctcgccgatgatcttgcgcttgcgctccggctcggagacgcccttcagagcctcaaggaagtcgtcggccgcgtccacggtgatgagcctgatgccggtggcggcgacgaagtcgtgcttgacctgctcgacctcgcccttacgcagcaggccgtggtccacgaacacgcaggtgagctggtcaccgatggccttgtgcaccagagcggcggccacggcggaatcaacgccgccggacaggccgcagatcacctcggcgtcgccgaccttctcgcggatcttcttgacttgatcctcgataatcgaggaggcatcccagtcgttgggcagcgcggcgcaacggtgcaggaagttttcgataagcttctggccaagcggggagtgcttgacttcagggtgccactgcacaccatagagcttgcgggattcgtccgccatggcggccacgggcgcgccttcggtgtgggccagcacttcgaagccggccggggcctgttcgaccgccacaccgtggctcatccacgtggtctgctcggcgggggagtcggcgaggatgccgtcggcgtcgtcgatggtggctgaggtcttgccatattcgccgagcgcggccttatccaccttgccgccgagctcataggccatgacctggaagccgtagcagataccaagcaccggaacaccggattcgaataccttggtatctatggtcggcgcgccgggctcgaacacggaggccgggccgccggacagaataatcgccttcggatccttggccaggatctcgtcaaccggcatggaatgagggaccagctcggagtacacgcctgcttcgcgcacgcggcgggcgatgagctgggcgtactgggcgccgaagtcgacgacaagcacaggaccgtttgccattgatattcccctaacgttcattggatttttacgtgggctgaacacacctgattatcactggtcaaggcgacaaggccgacacgcagagactatgtgcgtaaatcgaacaaactacatgcctgtaggcggacaacacgccgatttcgaacatgggaaatcgaacgtgcgctgctctagccaaatgctggatttccgcatgcttccgccgttttgaaaaagtatgttgaaaaaactaatggtgacaaacggtcagttgaaccgcacaaatactgaaatttccgcaacaattccgaacacacccgcaagaaatcgttcaaaagtcgcgttgtcctcgtaccatgacgattgattgggaacggaaaaccttggcaccgcaagggtcagggaccgtgaccgaacagaaataatcaatcgcacgatcacgtgcaggagtacaggagtacacatgacgagtcctgttattggcaccccttggaagaagctcaacgctccggtttccgaggaagccctcgaaggcgttgacaagtactggcgcgttgccaactacctttccatcggccagatttatctgcgttccaacccgctgatgaaggagcccttcacccgcgaagatgtgaagcaccgtctggtgggccactggggcactacccctggcctgaacttcctcatcggccacatcaaccgtttcattgctgaccacggccagaacaccgtgatcatcatgggcccgggccacggtggcccggccggtacctcccagtcctatctggacggcacctacaccgagaccttcccgaagatcaccaaggacgaagctggtctgcagaagttcttccgtcagttctcttacccgggcggtattccgtcccacttcgctccggagaccccgggctccatccacgagggtggtgagctgggttacgctctgtcccacgcttacggtgccatcatggacaacccgagcctgttcgtcccggccatcgtcggcgacggcgaggctgagaccggcccgctggctaccggctggcagtccaacaagctcgtgaacccgcgcaccgacggtatcgtgctgccgatcctgcacctcaacggctacaagatcgccaacccgaccatcctgtcccgcatctccgacgaagagctccacgagttcttccacggcatgggttatgagccctacgagttcgtcgctggcttcgatgatgaggaccacatgtccatccaccgtcgcttcgccgagctgtgggagaccatctgggacgagatctgcgacatcaaggccaccgctcagaccgacaacgtgcaccgtccgttctacccgatgctgatcttccgcaccccgaagggctggacctgcccgaagtacatcgacggcaagaagaccgagggctcctggcgctctcaccaggtgccgctggcttccgcccgcgacaccgaggcccacttcgaggtcctcaagaactggctcgagtcctacaagccggaagagctgttcgacgccaacggtgctgtcaaggacgacgtccttgccttcatgccgaagggcgagctgcgtatcggtgccaacccgaacgccaacggtggtgtgatccgcaacgacctgaagctgccgaacctcgaggactacgaggtcaaggaagtggccgagtacggccacggctggggccagctcgaggccacccgtcgtctgggcgtctacacccgcgacatcatcaagaacaacccgcgcgacttccgcatcttcggaccggatgagaccgcttccaaccgtctgcaggcttcctacgaagtcaccaacaagcagtgggatgccggctacatctccgacgaggtcgacgagcacatgcacgtctccggccaggtcgttgagcagctgtccgagcaccagatggaaggcttcctcgaggcttacctgctgaccggtcgtcacggcatctggagctcctacgagtccttcgtccacgtgatcgactccatgctgaaccagcacgccaagtggcttgaggctaccgtccgcgagattccgtggcgcaagccgatcgcctccatgaacctgctggtctcctcccacgtttggcgtcaggaccacaacggcttctcccaccaggatccgggtgtcacctccgtcctgctgaacaagtgcttccacaacgaccacgtcatcggcatctacttcgccaccgatgcgaacatgctgctggccatcgccgagaagtgctacaagtccaccaacaagatcaacgccatcatcgctggtaagcagcctgctgccacctggctgaccctggacgaggctcgtgccgagctcgagaagggtgccgccgcttgggattgggcttccaccgccaagaacaacgatgaggccgaggtcgtgcttgccgccgccggcgatgtcccgactcaggagatcatggctgcttccgacaagctgaaggaactgggcatcaagttcaaggttgtaaacgttgccgacctgctctccctgcagtccgccaaggagaacgacgaggctctgaccgacgaggagttcgccgacatcttcaccgccgacaagccggtgctgttcgcgtaccactcctacgctcacgacgtgcgtggcctgatctacgaccgtccgaaccacgacaacttcaacgtccacggctacgaggaggagggctccaccaccaccccgtacgacatggttcgtgtcaaccgcatcgaccgctacgagctgaccgctgaggctctgcgcatgatcgacgccgacaagtacgccgacaagatcgacgagctcgagaagttccgtgatgaggccttccagttcgccgtcgacaacggctacgatcacccggactacaccgactgggtgtactccggcgtgaacaccgacaagaagggtgccgtcaccgctaccgccgctaccgctggcgacaacgagtgataacacctccacggtgttgttagttcgctaacaccaaagggctcgggattcgtcccgagccctttgcttattcataagccctgtcacggcggggcagaacaaagcgaactgttgtgatgttttaatcgcgtagcaccccgaaatgcagtagggcgttgagtacgccgtcgtggtccacgtcatcggtgatgtaatcggcggcggcctttggctcggcggtcgcgttgcccatcgcgactccgatgccggcgtaggcgagcatatccgtgtcattgccgccatcgccgaaggccatggtctgctcgcgcgtgatgccgtaatgcgccatgaaccgctggatgccgcgcggcttgccgccatcggccggaatcagatccgtgaaatccggatgccaacgcaccccgcgcacattgctgcacagtcccaccagttcggcctccaactcgggcccgacaaagggactgatctggaaagtctcatgatccagcgcgcgggtgagtgggtcctcaaaataccgggtcggtgctgttttgcccagtttgctccacgtggcgcgaagcagatcattggactggttgaagtacacgtaatccttctcgccgaaattgcacaccacatcggggtgacggtccagccagtcgagaatcacctcaatatcagcagtatccaaggcctgcgaggcaaagaagccggtgtcatcaaaacaatactgcccattgaacgccaccacgccatcgaacgtcaccggcatggtatccagcaccacgtgcatctgtgaaggcgcgcggcccgtgcaaatcagcaccttgacgcctgcggcctgcagctggtgaatcgcctcgattgtggaatccggcaccgtatgggtcgtgaaactggtgagcgtgccatcgatatcgaagaatacggctcggatatcggcattggcagtatcggtagtcatagcttccattgtcaaagcccctctcgacgtgctttccggcgtgttcagcacgcctatagcgggttatcaaacgcacgaatcccggacattgcatgcgcgccataaaagacacctatacggcaatcggccattttccgtcactttcgcggttcaagcgcgttatggtgttacccgacatcaattttggagagaggaaatccaatgacagcagcaacccagccggcaaccccggccgctcctaacaataacgagccggtgcgtgtgaaccacaccgcccgcaacgtcatcatcaccatcgtggtcgtggcgattatcgccgtggccgcgttcttcggctaccgcgcgtttgccggtgccaacgagtcgtccgccaagggcagcaagggcaacccggtcaagatcggcgtggtcggcgctaccaaccccgaatgggtcaagttcaagcaggacgccgagaaggccggcatctacgtcgacatcgtcgacttccaggactacacctccgaaaacccggcccttgactccggcgagctggacctcaacgaattccagcacctgctctacttggccaactacaacgtgagcaacaagaaggacctgcagcccatcggcggcaccgccatctacccgctcggcgtgtactccaccaaggtcaaggacatcaaggacctgaagcagggcgacaccgtcaccattccgaacgacgaaaccaaccaggcccgcgctatcggcgtgctcaaggccgccggtctcgtgacgctcaaggacgactggaccgccttctccaccccggccgacatcgacgaagccaagagcaaggtcaaggtcaccccgctcaaggccgaacaggtggccaccaccctgaaggacccgaccatcgccgctggtgtgatcaacaacgactacgtggccgacgccggtctcgacccgaaggacgccatctaccaggatgccgccgaatccgaagaagctcgcccctacatcaacgtgtgggtggcccgcaaggcggacgtgaacaacgagacctacaagaagctcgtttccatctaccagcagaaggatgtgctcgacgccctgcaggagaactccggcggtaccgcggtgttcgccgacaagttcagcgccagcgagctgcaaggcttcctgtccgacattgagaaggatgccaaggcccagcagtgagccgcggctgatacgagcgcacgactaacctgtccatagccattaccaccaagcggagcgagtacccgagccaacaatcgggattcgctccgcttccgtgaccggacaccaacaaccagcatcagggagcactatgagcgaccccatcatcaccttcgaccatgtcgtgaaggaattcaaaacacgcggacgcggcgcgaacatcgcacgagccgtggatgacgccagcctgaccatcgatcgcggcgacatcttcggcatcatcggctattccggtgcaggcaaatccacactggtccggcttatcaacgcgctcgaacgacccacctccggcactgtgaccgtgcttggtactgatatcacctctctgagtgagaccaagctgcggcccatccgccagaaaatcggcatgattttccagcagttcaacctgttctccaccaaaaccgtggcccagaacatcgcctacccactgcaactcgatcactggcgcaaggactatcaggatcgtcgtgtcaacgaactccttgaattcgtgggcctcagtgagcacgcaaacaaatacccttcgcagctgtccggcggccagaagcagcgcgtcggcatcgcccgcgcactggccactaatccggagattctgctcgccgacgaagccaccagcgcgctcgacccggaaaccaccaccgaagtgctggccttgctcaagcgtgtgaacgaggaattcggcatcaccattgtgcttatcacccatcagatgaacgtggtccagcagattgccggccgcgtggccgtaatgagcgccggacgcgtggtcgaatccggcgacgtatacgatgtgttcgctgcaccccagcagccggtgaccaagcgattcattgccaccgcattgtctggcctgcccgaggaagaccgggtcgagcgattgcatcacgaatggtcgggccgcattgtcaccgtgcttatccgccaaaaggacgtttccggcacccaaggccatgaactcaaggcatccggacagaatatctccgaactcatcgccaaatacggcgtcgaatccagcctgctctacggcggcatcgacacggtcaaggggaccgccatcggtgccatcacctacgaattcaacgggcccggctggcatgtggacgaattcctgcgcgagctcgccgccaatagcgacgtcatcgacttcggcaccgccgcaaagcctgtggcctacgccgacgcagtcgccggacatgcctcctacgccgaagaccgcgcccatgacccactggcggccgatactgccaccgcgcccgccgcgtccgccgccgcacatgaaggagccaacgcatgatcatcctcgccaacccgcgtagcgactggaacgtgctgcgtccactactgttcgaatccatcggccagaccctgaccatggtgctcgtcaccctcgtcatcggcggattcctcggcctgatcctcggcgtggtgctctatggcacccgccccggcaacctgttcgagaacgcggtcgtctaccgcatccttgacatcatcgtcaacatcgtgcgcccgattccgttcatcatcttcctggcagccatgcagccgctcaccatcgtcgtggtcggcacgtccatcggcaccgtggccgccatcttcccgatggtggtgatgtgcaccttcgccacctcgcgtctggtcgaacagaatctcgtgccggtcgacccgggagtaatcgaggccgcgcgttcgatgggtgccggcaagctcaccatcatccgcaccgtgctcatccccgaagccctggcaccgctgatcctggcctacgccttcctgttcattggcgtgctcgacatgtctgccatggccggctacatcggcggtggcggtctcggtaacttcgccatcgcctacggctaccagaagttcgaccagaccgtcacctggacggccgtgatcatcatgatcgtactggtccaggtggtgcagggcatcgccaacgccatcgccaaacgactgctcaaacgccagcaataacaaggcatactgaccccatagatcgcggccctcgccaatatggagcgagggccgcaatatattcttcgcgctactagaatcgggaaccatgagtgaacatatcgacatcgaccacgaactcatcactatccgccactacctgcacgcccatccggagcgtagtttccgtgaattcggcaccagcatctatctgaccgaccagctcaaggcgcacggcatcgagatcctgcacaacccgctggagactggtgttgtggggctcattcagggcgaggccggtcccgggccgcgtatcgggctgcgcgctgacatcgacggcctgcccatcgtggaagactccggactggagttcagctccgtcaatgaaggcgtgatgcacggctgcggccacgacctgcacatgaccggtctgctcggtgccgccttctggctcgccgagcaccgtgacaagttcgccggctcgatcaagattctgttccagccgagtgaggagaccggccaaggcgctcgcgccatgatcgacgccggactcgtggatgacgtcgaagccattatcggcacgcacaacaaccccaactatgcgcccggccagctggccatcggcgttgagccgatgatggccggctgcgtgaaattccgcgtgaccctccacgcccaaggcacccacgccggttacccgtacaagggcaccgggcccatcgaagcgctcgccagtattattctgagcctgcagaccatcgtgagccgcaacgtcacgcccttccacccgctggtgctgtccgttaccgaagtgcacggcggccatgtgtggaacgtggtgcccgccgaagccggattccaagggactgtgcgctatttccacaagtcggatggcaatctggtcggccgccgattcaaggaagtggtggaacacaccgccgaggcatacggcatcagcgccgacgtggtctgggatgactttcaagacccgctggtctccgatccaggtctcgccaaggccgtggcggcggatgtcaacgactacgcgcagctcgaaccgatacgtcagtcgatggcgggggaggacttctgcgaattcgccaaggtgacgttgccggtgttcgcgttcgtcgggtcaaacggccaggaaggttgcgccgactggcatagcccgcatttcgtgggtctcgacgaatccattcccaccttcgtcaacttctacgtcaacaccgctctgcgcgtgctcaacgagctgaagtaaatccttttctggctcgcctccggaggctgaggcgttaggcagacagcccagtgggctgtctgtagccgaaggtgaggcgacagccgaaccagatatgcgcgggcctcgcccgtccataagtgcaggacgagctatcagcgaagctgactgaggggagtggcattcgttcattaggtcgattcatcgtccattaggtcggtgaacggcgatactggttgttggaatcgcgccattgcaacgactgatatcgcattgcagtgacctaatgaacgcaaaaacgacctaatgaatgacgccaagccggaagaacaggcaatccgacgtcatacgcggctacactaagaatctatgacacagcttcgcttcgcactcgcccagatcgacacctgcgtcggcgcgcttgacgccaacgccgccaaggtgctcgactactcccgtaaagccgccgcaggaaacgcccaagtggttgttttcccggaaatgaccctcaccggataccccatcgaggatctggccctgcgccgcaccttccgccaagccgcatgggacaaggccaacgaactcgccacccagctcaacgacgacggcctcggcgatctgttcgtggtggtcggcaccgtgggcaccgaccgcaagacctccaagccgcgcaaccgactggtggtcttgcaccaaggcgtggtctgggctggctacgacaagcacttcctgcccaactacggcgtgttcgacgaattccgcatcttctccgccggcgaccgctccgtgaccctcgacgtggacggcgccaccattggcgtggccatctgcgaggacatctggcaggacggcggcccggtggccgacctggccaccaagaacatcgacctgctgctcaccatcaacggctcgccgtatgaggaaggcaagaccaacacccgtttcgagctcgcccagcgtcgtgccgccgaggttaacgccccggtcatctacctgaatcaggtcggcggtcaagacgacctcgtcttcgacggcggcagcttcgtggtcgacgccgacggcacgcttatcgaacgcagcccgatgttcatggaaaacctgacgttctgggacttcgattccgccgccgaacatcaggccaaggccgagatcgttccggaactcgacccggacgaagaggtatacaccgcctgcgtgctcggcctcaaggactacatggccaagaaccacttcaccggcgtgacgctgggcctctcaggaggcatcgactccgcactggtagccgccatggcggccgacgcatgcggcggcgagaacgtctggggcatctccatgccctccatgtactcctccgacggttccaaagacgacgccgccgatttggcctccaacattggcgcccattacgaggtccagcccattgagccattgttcaacgcctaccaacagcaacttgaccttgatggcgtctccgccgagaacctgcaggcccgcatccgcggtgtgatcgtgatggccagctccaattcgcgcggtctgctcgccgtggccaccggcaacaagtcagagctcgcctgcggctactcgaccatctacggcgatgcggtaggcggctacgcacccatcaaggacctgctcaagacccgtgtctgggagatcggccgttggcgtaacaaggccgcggccgcaggcgtcggcatcggcggtctcaagatcgtgggcaacgaggacggcaacaccggcatcccgttgaaggacggcgtgatgattccggtctcctccatcgagaaggcgccctcggccgagttgcgccccgggcagaaggactccgactccctgcccgaatacgcgctgctcgacaaggtgctcgccgcatacatcgagcacgcgcacggccgcgccgacctgttagccgacggcttcgaccaggtcaccgtagacaccgtgatgcgattggtggaccgcgccgaatggaagcgccgccaatacccgctgggaccgaaggtcacggccctcgcgttcggccgcgaccgccgcctgcccgtcaccaacgcattcagggaataaacatatattgctcccgccagcgggagcaagtaataccgttgaggaggtaccaatgacagacgataacaagaagcagtggtatttcaacaccgtcaagaagcaggccgagctgggcatgatctcaccgatcgaacagcgcatgggtccgtacaagaccaaggaagacgccgaacatgcgtgggacatcgtggtggaccgcaatgccagatgggaggaggagaaccggcgctggaagaactacggcgtgaaacccgcacaggctcgccccgaggattgacggtcgaaaactgacggatacggttctgctgtcaatctcaagaccgaaccgctcatacgaacatcacagtatgagcggtttcccatatctggagacgtgcaatagtcccatcaatatctagaagccattggaatggtagcgttcacagaaacaatgtgagatagctcactcccaatttcagcttttctcaagcaagtgccaactacactgttgaaccaagggttccgtgaagatgcgaaacctacaaccccatttaaggagtgacatgaccgcagtggaaaatgcagctgtctcccaggaggagctcgacgccaaggcgtgggccggcttcaccgagggcaactggcagaaggatattgacgtccgcgacttcatccagaagaactacaccccgtacgagggcgacgagacattcctggctcctgccaccgagaagaccaagcacctgtggaagtacctcgacgacaactacctggccgtggagcgcaagcagcgcgtctacgacgtggacacccataccccggccgacgtcgacgccttcccggccggctacatcgactccccggaagtcgataacgtggtcgttggcctccagaccgacgttccctgcaagcgcgcgatgatgccgaacggtggctggcgcatggtcgagcaggccatcaaggaagccggcaaggaaccggatccggagatcaagaagatcttcaccaagtaccgcaagacccacaacgacggcgtcttcggcgtgtacaccaagcagatcaaggtcgcccgccacaacaagatcctcaccggtctgccggacgcctacggccgtggccgcatcatcggcgactaccgccgcgtcgccctgtacggcgtgaacaagctcatcgccttcaagaagcgcgacaaggactccgtgccgtaccgcaacgacttcaccgagccggagatcgagcactggatccgcttccgtgaggagcacgacgagcagatcaaggctctgaagaagctcatcaacctcggcaacgagtacggcctcgacctgtcccgcccggcccagaccgcgcaggaagccgtgcagtggacctacatgggctacctggcctccatcaagtcccaggacggcgccgccatgtccttcggccgcaactccgccttcctcgactgctacatcgagcgcgacctccaggccggcaagatcaccgagaccgacgcccaggagctcatcgacaacatcgtcatgaagctgcgtatcgtgcgcttcctgcgtaccaaggactacgattcgatcttctccggcgacccgtactgggcgacctggtccgacgccggcttcggcgatgacggccgttcgatggtcaccaagacctcgttccgtctgctcaacaccctgaccctcgagcacctcggacctggccccgagccgaacatcaccatcttctgggatccgaagctgcctgaggcctacaagcgcttctgcgccaagatctccatcgacacctcggccatccagtacgagtccgacaaggagattcgtagccactggggcgacgacgcggctatcgcatgctgcgtgtccccgatgcgtgtcggcaagcagatgcagttcttcgccgcccgcgtgaactccgccaaggccctgctgtacgccatcaacggcggccgcgacgagatgaccggcatgcaggtcatcgacaagggcgtgatcgagccgattaccccggaggccgacggcaccctcgattacgagaaggtcaagaacaactacgagaaggccctcgaatggctgtccgagacctacgtcatggccctgaacatcatccactacatgcacgataagtacgcgtacgagtccatcgagatggccctgcacgacaaggaagtgtaccgcaccctcggctgcggcatgtccggtctgtccatcgccgccgactccctcgccgccgtcaagtacgccaaggtctacccgatctacaacaaggacgcgaagaccctggaaggccacgagtacgagtacgttgagggcgccgacgacgacctgatcgtcggctaccgcaccgagggcgagttcccggtctacggcaacgacgacgaccgcgccgacgacatcgccaagtgggtcgtctccacggtcatgggccaggtcaagaggctcccggtctaccgcggcgccgtcccgacccagtccatcctgacgatcacctccaacgtcgagtacggcaagaacaccggttccttcccgtccggccacgccaagggcaccccgtacgctccgggcgccaacccggagaacggcatggactcccacggcatgctgccgtccatgttctccgtcggcaagatcgactacaacgacgctcttgacggcatctcgctgaccaacaccatcacccctgatggcctgggccgcgacgaggacgagcgcatcggcaacctggtcggcatcctggacgccggcaacggccacggcctctaccacgcgaacatcaacgttctgcgcaaggagaccatggaggacgccgtcgagcaccccgaaaagtacccgcacctgaccgtgcgtgtctccggctacgcggtgaacttcgtcaagctcaccaaggagcagcagctcgacgtcatctcccgtaccttccaccagggtgccgtcgtcgactgatgaccaaccccgcgaaccgcggcaatgactaactgaaggggtggggcacggctccaccccttccttatttcccacagactttcgcatcatttggaacaggaggacaacgatgcccgcaacacccacgttccgcaccacgaccaggcatatgctcaaggaatcgaagacctatgcctcgcagactttgatgggtggcctttccggctttgaatccccaatcggactcgaccgacgtgaccgcctttccgccctgaaatccggtgatatcggcttcgtccactcttgggacatcaacacctccgtggatggaccgggcacccgcatgaccgtgttcatgtccggctgcccgctgcgctgccagtactgccagaacccggacacttggaagatgcgcgacggcaagcccgtctaccttgacgccatgatcaagaaggtcgatcgttacaaggacctgttcaaggccacgcatggcggtatcaccttctccggcggcgaatccatgatgcagcccgccttcgtctcgcgtgtgttccatgccgccaaggagatgggcgtgcacacctgcctcgatacgtccggcttcctcaacacgaattacaccgacgagatgctcgaggacatcgacctgtgtctgctcgacgtcaaatccggcgacgaggagacctatcacaaggtcaccggcggcaccttgcagcccaccatcgattttggccagcgactggccaaggccggcaagaagatctgggtgcgatttgtgctcgtgccgggcctgaccgactccgaagagaacgtcgaaaacgtggcgaagatctgcgagtccttcggtgatgccgtcgaacacatcgacgtgctgggattccaccagcttggccgcccgaagtggcacgaactgcgcatcccatacccgctggagaaccagaagggacccaacgccgccacccgcgaacgggtgaccaaccagttcaaggaccacggcttcaccgtgtattaaattgcagggccgaaccgcgcgtaaataccacgattcggcccgttcgcccataccctagagatatggccgacatctacgcatttcctacgggagagtccaacgacggacgccccgtgcgccctcagggtgtgccggatgaagtatgggcagccgtcgaatccgtcagcaccatgaagcgcatccatgacgtgcgctatcgggagattcccgtgccttccaccttggccgattatggtatcggcgtggaattcgaagcgggagagcgtgccctcggcgatgccttttccgccggtcttggcagcgatgccgaatcacgaatcgccacaggctggatcatgatgctttatgctcatgagctgcgcattgactgggattccaactggcgttgcgtggcgttcgcgcgactgccgctggaaaccgccgaaaacgattctctgacccccggcatgtactgggatgacatgtgcgactatttcgacggcatcgagccggattcggtatccggcacagtcaccgtgacccaaaacacggcttttggctcgatggccggctccaccagcgccgggtgtgagattcgcgtctcatggaccccgcttgacgggaccgggccggacggtactatggacgccggcgcacaagtccgctcgtgggccgcattcatcagatccaccatccgttttgaggaggatgacgccagttgagtgacgtccgtgacaccgaaccccgactgctgaaagagcctcgcgggggagtacccgatgtcacttcgacgctggacggctatcatcgtgtctgcgatgcgatggccgaggcgacgggctcgctggccgccgacgccgaacgggcgtccggcttccgctatggacacgaggattggctgattcagttcaaacgtgagggtgcaggcatcgccttgcttgatcccgtcgccctgacccgggccggagctgattggaatgaattcaatgacgccgtgggcgacgccacgtggattctgcatgattctctgatggacttgcccggattcgccgaaatcgggctcaaacccaaagccctgttcgacacggaaatagcggcgcgattgctcggcctgcaccgctttggtctggccgccgtcaccgaacactacctcggcatcacgctagccaaagagcattccgccgccgattggtcctaccgtccgctgccgcgcgactggcgcaactatgcggcgctcgacgtggaggtgcttatcgaacttgaaaccatgatgcgtcgtgacctgaaagccgcaggcaaggacgagtgggccgctgaagagttttctcacgctttggttgcgggccttgccccgcgcaaaccgcatccgattccttggctgcgtatctcgcgcatcacccagctgagtcgtgatccaaggggcttggccatcgccaaatccctatgggaggagcgcgaccgactcgcccggcaatacgatattgcgcccagcctgttattggccgattcatcaatcatcgaggcggcgaccaacaagccgcacaatgctgcccaattccgcgcgctccgatccctgaacgagcgtgtgcgcatccataccggcaccgagcaggacaaaatgttcgagcggtacgcgccgattcagcgtgcggtcaaaccgaaggtctggaagcaggccatcgatcgagccatagccctgaagcccacccaatggcctaccatgcccgcccccgaacaggacgaaaacggtgtggtgaacgcgccccgatccatgcggctgtggcaacagcgccatccggagcgttatgaccgtctgcaacgggtgcggcgtgtgatcaaccgcatcgccgaagacacccgcacgccggccgagatgatcatcaagccacagatcctacgcaacctgtgctgggtggaagacccggtggaagtggacgtcgagacgttcctgatcgagcagggcgcaaggaactggcaagtgaaactcattgcaccgtccgtaagtggcgttatcatgtagaggttgccttacggcagaactgtaagaaataacgacttttgaggagtcattagcgtgaagatcagcgttcgtaacctcgagcccaccaaggtgaagctcaccgtcactgttgaaccggaagagctcaacccgtatctggatgcggcccgtaaggaaatcgccaagcaggtgaacgttcccggcttccgtaagggccacgttcccggcaagatcatcgaccagcgcatcggtttcgccgccgtcgccggtgaggccgtgaacgacgcggtcccggagctgtactccaaggccctggatgagaagaagattcgtccgatggctcagccggagttcgacgtgcaggatgttccgcagtccgccaacgacgagaccaagctgaagttcaccgccaccgtcgagcgtcgtcctgacatcgaactgccggaaatcgacggtcttgagatcgccatctccaagccggaagtcaaggatgaggacgtcgacaagcgcctcgagaccctgcgtcagcgcttcggcaccttggtcggcgtggaccgcccggccgccaagggcgacttcgccaacatcgacctgactgctgagattgacggcgagaccgtcgactcccaggaaggcgtgagctacgagctcggctccaacaccatgctcgacggtctggacgaggcccttgacggcctgtccgccggcgaggagaccaccttcgaaggcacgctggaagccggcgagcacgagggccagaaggccaccgtgaaggtcaaggtcaactccgtcaaggctgaggaactgccggagctgaacgatgagttcgcttccgaagcttccgagttcgacactctggacgagctcaaggctgacatccgcaaggctgccgctcaggacgccgaaggtcgtcaggccaccgaggctcgcgatgccttcatcgccaagctgcaggaaggcctcgagatcccggtgccgaagggcgtcaaggccaacatggtcgaagagcagctcaagggcatgaccccggatccggagaaggccaccaaggagcagaaggctcaggccgaggagaccgtggagaaggatctgcgcgatcagatggtgctcgacgctctggccgagaagctggacgttcaggtgtcccagtccgacgtgttcaacttcctcgcttccatcgcccagcagtacggcatggatccgaacaacttcatccaggccatcatcaagaatggccagcttggctccgctgtgcaggaagtcggccgttccaagggcctgctcgccggcatgcgcgccgtcaagttcaccgctgatggcgaggttgtggacctctccgccttcctgggcgaggccgctgaggacgaagagtccgagtccgtcgaggccgcttccgctgctgccgccgtggccgacgaactgtccgccaaggatgacgccaaggatgctgagtgagcatagcctcatcgcgttagcgtgattgtttgagcccggaatcgtgtttcatggttccgggctcttcctattctggcaaaaggactatttctttggctcccctctttgaggggagctgtcgagcgtggcgagactgaggggagttcccaaggcatactcgttgcatagggtgcggaggttgacatgcagccaacggttactatcaaacgccttggttggctcgctgcggcgaccattgtgctcggcgtgctcatcggtgtgggagcaggtctgctgaccctgttgctctacggcgttgaacatgtgctgctcggctacatcgaaggcccagaattgcctggtccattcggcgtgcccgctgcacgccgtgcgatatcggtgaccgtgggactcagcatcgcaggcattatctggtatctgatgcgacacaaaacgactgcggtgccctcagtcaagaaggccgtggcgggaaagcgaatgcctttctggcaaaccattgcgcatgtggtattgcagattttcatcgtcggctccggtgcctcgatcggccgagaagtcgccccacgcgaactcggcgccatgctcgcgcaacgtttctgcgacctgttccatatcgagggcgttgacggcatcgaccggcgcatggtggtggcagtggctgccggtgctggtctaggaggcgtctatgacgcgccactggccggcatgttcttcgccgtcgaaatcctgttggtagatgtgacaatcgaaaaagttgcgtttggactgggcatgtctgccattgccgcattcgtggcggttgcgatcaaagggcatcacctgttctacgacattaccgccatgcaaccggaatccacgccaacgttaatggtgttcgctctgatctgcggtgcggcatgtggagtgggcggcgcattgttccgaaaaggttcgcaatgggcggaagcgcacaagccaaccggtaaggctattctgtggcagatgccgctggctggtctcatcaccggtttggtggcgactgttgtgccgcaggtgatgggcaacggccgtgccgcagcgcaacttggattcagcacattcattcctgaaaccgccggcactgctggtgccatgcagtcggcatcttcagcggccgcctctccatggaacttgctgacgggcggcggtaatgtatccgattcggcctctggcgggggagcgggctctggaatggcatcgctctgggccatgcttcagggtgggagcggcccttctggatccgtgatgaacgccggtttcccgctgtcccagtccaatatctggatgttgctgggtgtgttggcactcacctttgttgccaaagcgctggtgacgctgatgaccattcgctccggtgcgtcgggcggtgtgctgcagcccggcatcgcattaggttccacgctgggtgcgatgctcggcctcgtatggatactgatgtttccgaccgattcggtaaccgcgtgtgccttgatcggtgcggcttcgttgctttcggcctcacaacaggcaccgcttatggccatgtgcttggtgatggagctctctgaagcgccgattaccttctttgtgccggtcggcatggccgtggccacgtcgtcactgatatcaaagtggttgctgagtcgtaagtaagtaaatacatatattctggctcccctctctgaggggagctgccccggtcgaaactcccctcagccgcctatggcgacagctcccctcagagaggggagccgaggtaaagaaagctatgtcagaaaatacagaaattcgctcggcacttgaattgcttgccgctgagccgctcactgagcagattgactactatcgaaagccattcatggtgttatgggccgccattcaggaggcagccagcgatgtggccgaagactacgacttacctgcggatatggcccaattatgggtggccgaacagatgcgccaagtcgccgattcactggtcgatcggctcgcggaaaaagccgtggcccatggtgccagcaagtccaacgtagcgcgagccgccggtgccagccccgccaatgccgcccgtcgcttcccgcgtctgggcgacgatgccgcctcccagacccgcctcctcattgacgacgtcctcgacaccttggaataacccgaaatccctacgctacccgccaaaaagcacgcgaaaagacgccttcagtcgcttcaaggcggtagtctgaacaatgttcgagtaattagaaggagaatcaaggtgagcaatacctttgcgaccttgccggtcatggcgggcgatgacgtcccggccggccccgtcgacccgattttcaaccgtctgctcaaagaccgcatcatctggatgggtgaagaggtcaaggacgatatggccaaccgcatctgcgctcagctgctgatgctggccgccgaagacccgaagaaggacatctggctgtacatcaactcgccgggcggctccatcaccgccggcatggccatctacgacaccatgcagctcatcgagcctgacgtggcgaccgtgggcctgggcatgtgtgcttccatgggccagttcctgctgagctccggcaccaagggcaagcgttacctgacctcgcacgcccgtgtgctcatgcaccagccttccggcggcatcggcggcaccgccactgacgtgcgcatcaacgccgagctcatcatggacatgaagaagaccatgagcgagctgaccgctgagcagaccggccacaccctcgaggaaatctaccgcgacaacgaatacgaccactggttcaccgcccaggaagccctcgactatggcttcgtggacaagctcgtgaccacgccggacaccatcggcaacaaccagcagggggagtgagactcatggcaagtgaagaagcaaagttcgccgcccgtgccgaccgcttggccggccgtcagggcgtagccggtttcatgccggcctccgcccgcgcagcccagcccgcgccgaccaaccgttacatcatgccgcagttcgtggagaagaccccgtatggcatgaagacccaggacgcctactcccgcctgttcgaggatcgcatcatcttcctcggcgtgcaggtggacgacgcctccgccgacgacgtgatggcccagctgctggtcctcgaatcccaagatccgaaccgtgacgtgatgatgtacatcaactcacccggcggttcgatgacggccatgaccgccatctacgacaccatgcagtacatcaagcccgacgtgcagaccgtgtgcctcggccaggccgcctccgccgccgccattctgctggcctccggcaccaagggcaagcgcctgatgctgccgaacgcccgtgtgctcatccaccagccggccatcgaccaaggcttcggcaaggccacggagatcgagattcaggccaaggaaatgctgcgtatgcgcgaatggctggaggagaccctcgccaagcacaccggccaggacgtcgagaagattcgccgcgacatcgaagtggacactttcctgaccgctcctgaagccaaggaatacggcatcgtggacgaggtgttggaacaccgccagtaaaacttccggacattgcaataccctcggtcggcaacgaccgggggtattgtatttcaaggatgacaatgataatgcgcagcgtggcggttcgacggtgcggcgtagtcggcaaaggagaatcatgggacgtgtggtgagctacaacgaggacgtaccccgttgcacgttctgcggcaaaaccgaacatcaggtacgaaaactggtggccggtcccaatgcctccatctgcgatgaatgcatcgccctgtgcgtggacatcatctccgaggagcgtgtcaaagatgccgaggtcaattcgctgagcctgcccaagcccgctcagatcttcgattatctcaaccgctacgtcatcggtcaggagaacgccaagcgcgcattatccgtagccgtatacaaccattacaagcgcgtcaacatggagcttcaggagtccgctgagcagcttgacgggaataacgggcacagtggccagaccggcaaacaagccaagcaatccgttcccacccagacgcgtgctgcccgccgcagcaatgaccctttggctgacgtcgaggtcgccaagtcaaacattctgttgctcggccccaccggcgtgggcaaaacctatcttgcgcaggcgttggcccgcgtaatgaacgtgccgttcgtcatcaccgacgccaccaccctgaccgaagccggctatgtaggcgacgatgtggaaaccgtgctccaacgtctcctccaagctgcggatggcgacgtaagccgagcccagcacggcatcatctacattgacgaaatcgataagatcgcccgcaaatccggtgagaacacctccatcacccgtgacgtgtccggtgagggcgttcagcaggcgttgctgaagatcttggaaggaaccatcgcctccgtgccgttggaaggcacgcgcaagcataaggagcaggacgttgcgcagatggacacacgcggcatcctattcatctgcggcggtgcgttcgtggggctgacggacattgttcgcaagcgattaggccgtcgagagaccggcttcggcgcgaattggcacgacgccgacatgaaagacgaggaattgctcgaacaggtcaatgccgatgatctggccgagttcggactgttgcctgagttcatcggacgtttgccggtcaccagtgtgctgaaggaacttaccgtagacgatctgacggcgattctcacccagccagccaacgcgctgatcaagcagtaccgtaaactgttcgccgtcgacggcgtcgatctgcaattcacagaacaggccattcgggcgattgctgatatcgctatcaagcaggggaccggcgcacgcggtttgcgttcgattatcgaacgtacgttgcaggacacgatgttccagttgccgagtttggatgatgtgaggcaggtgattgtggacaaggcgtccgtagagggttccagcacgcccaaactcctgcgcgaagccgtggatgtgccgcagggacgtctcaaagttgcgcagtcggttttgcttgaccgagtccgtacacacgaggcgtgaggccagtaaatacgccgttgcggtagtggtcgggatggtgcgactcgccgcaacacgccgagttgcattcagctgaacggcgtgtattatatatcgagttgtctgaaagacaacatgcgccagtagcccagcggattagagcagctgactacggatcagcaggtcgcaggttcgaatcctgtctggcgcactcccgaaccacggggacaacagtggtatgcgccagtagcccagcggattagagcagctgactacggatcagcaggtcgcaggttcgaatcctgtctggcgcactcccgaaccacggggacaacagtggtatgcgccagtagcccagcggattagagcagctgactacggatcagcaggtcgcaggttcgaatcctgtctggcgcacagtaagcctcgaaagcgaaacgcttccgaggcttttccaattgtattggcccgtttgagtcggttgagtcggccacacagggttgggctaaggttgcccttcgcgactcagcccggagcggaacgtcctgagatattccgtactattacatacggttcatccaagagagtgcagcaaggagacgcgatggccacgaccgccggcgcgaagaagggactttggtccaccatcaggcgaatcgccgcctcagaccgtatttccggactcatcatgcttggcttcgcgctcaccggcctggtgctcgcgaatctgcccgccaccgcgcatgcgttcgagaccgtagcggaaacgcatctgttcatcccctacaccaatctcgacctgcctattggccactgggcccaggatggtctgcttaccatcttcttcctgaccgtgggcctcgaactgaagcaggaactcaccaccggctcgcttgccaatccgaaagcggccgccgtgccgatgctgtgcgcggtgggcggcatgatcgccccgcccatcctgttcctggccgtcacggcattgttctctcagatcgggcctggtgaacccggcacgctgattctgaccaccaccggcagcagcatcccgttctcggagatgtcgcacggctgggcagtgcccaccgccacggatatcgcgttctcgctggccgtgctcgccctgttcgccaaggccctgcccggttcgatccgcgcgttcctgatgacgcttgccaccgtcgacgacctgctggccattattctgatcgccgtattcttctcctcgattaacgcctggtattggttcatcggcatcgccgtatgcgccgccatctgggcatacctcgtacgactgaaaaaagtgccgtggatcgcggttggcatcgtcggtatcctcgcttggatcatgatgttcgaggcaggcgtgcaccccacactggccggcgtgctggttggcctgctgaccccctctcgtgaaatgcacggcgaactctcgccgcgtgccgaacgctatgccaacaagctccagccattctccgcactgctggccctgcccatcttcgccttgttcgccaccggcgtacacttcgagtcgatgagcccgctattgttggcctcgccgctggtcatcgcactgattgtggctttggtggtcggcaaacctctgggtatcatcaccaccgcatggctgtccacgcatgtgggcgggctcaagatggccaaggggctgcgtgtgcgcgacatgattcccgctgccgtcgcctgcggcattggcttcactgtgtccttcctcatcgcttcgctggcgtacaagaacgcggaactttccgctgaggcgcgcttcggcgtgctggtggcctccctgatcgccgccgcgatttccggtgtgctgctgagccgtcagtccaagcgattcgagaagaccgcagccgcagcagcggctgatgcggaggatgacgaatcgattgatggtgatggcatcgggcagccaagccacaccacagagcccaccacgcccacggaacaccccggcaccctcgccgacggcaccgccagtgtggaaatcgacttccgccactgatggcttagacggtccctactccattgttggccttgtttcgtgaaaaccgtacgctgagacgcgctcagtgtacgttcttcacgagatgaggccttatttcgcggaaaacgtacgctcagtgtcactcaccgtacgttcttcacgaagtcaaggatgatttcgcggaaaacgtacgcagagcttcaggcgctagaatgcgaagagtcgatagcgccgtacaggaggacattggatggcaaagaagcagaagaaatccaagaagaacgacggcaaaaaggccgctgaagcaaagaatctagccgaggccgcatccaagtccgcagtcgtggacgatatggaaccattggaagccacagccgcgaatgatgcggcggcgttggaggctgagacggcaactgaggctgcggccacaccggtgaacccggtcgatctggaggacgcctcgccgctgggcgatacctatcatcgcggcccggtgattctacgcggccagatgattccctcggacaacaccaccgccaacctgctgaaacccgatcaggacaccgactggctgcacatggacccatggcgtgtgctgcgcatccaatcggaattcgtggacggtttcggggcgctcgccgagctcggacctgcggtctctattttcggctccgcacgcacccagcgcaccgaatcgatctacaaggcagcacggcgcatgggtagccagatagccaagcgcaacatcgccgtcatcaccggcggtggtcccggcatcatggaagccgcgaataggggagcggcactggccggcggcaaatcggtgggacttggcatcgaattgccgcacgagcaggggttgaaccagtgggtgaacctcggcatgagcttccggtacttctttgtgcgaaaaaccatgttcatcaagtattcctccggcgtgatcgtatgcccgggaggcttcggcacactggatgagatgttcgaattattgaccttggtccagacccacaaggtggcgaatattccggtggtgctctacggcaaggaatactggcaggggctctttgactggctcaacggtccggtggccgagcatggcatgatctcgacgatcgacccgaaactggtcaccgtaaccgatgacgccgacgaagccgtggacgtggccgtcagcgcaattgtgaggtaagcgagatagagtggctcccctctccgaggggagccaaggacagagttactttttgtaggcgatgagcaggccggtgccgtcaggggtgagcgtggactcgaaaccttcgtcatcttcgacggtggtgagcagctcacgcatggcgatggccttgtcgctgcggtcggccggattgatcacgccgccctgaccgtcctccaacgccagcacatcggtgaacacgatcacgccgtgcacgcgcagcagacgggaggcctgggcgaacgtggcggcatagttctcggcgtcgcccgccaccacgatcagatcgtaatcattggcgttgaggcgcggcagaaacacgctggccggggcgttcaccgcacgcaacgtggtgtcggtctcgtcctgcagctcggcgaacgccttgcgaatcagcgcgatgccctgggcggtggaatcgaccgcagtcagcaggcccttgttatccagtgcatgggcgagctgcaaggtctccaccagcgagccggtgcccacggcaatcaccgaagcggcgccggtgatgcgcaccagcatacccagcagacgggcctgcgccgccgaaccctgcaactggccggactcgtcggcggccgtacgggtgtcggtcaacgcatcggattcacgttcgcgcgcgtgttcctcggtgaattcccatgccttggcgaggttggtgtactgcgttctgtccataattcgttctttcatgtcttctctcgtgcgggcacccagcggatgcatcgacgcatgtgcttaggcgatcgccgcagccagccgcggcgcggcttagcgctcgcggaccttagccacgatctgccacatctcctcgcccacatcgatgccgcgcgggcagtggcgggagcaggcgcgcacggactggcaggcggccacgccgtcggcggtgtcgatggcatccatacgctccatggccttggtgtcgcgcgaatcgttgacgaaacgggaggcccaaatcagcgcggccgggccgatgaaggcgtcgccgccggcgtacaccgggcaggcgccttcgcacacgccgcaggcgatgcagttgctcagcagctcgtatttggcgagttgttcggggttctgcaggtattcgaacacgtccaccttgccttcggcggtggtggcgagcacgccgtccgcctgaagatacggggtgagcttcctgatctggttgagcatagggtcgatgtcggcgatgaggtcgcgctgcggcgggaagccgggcagggacgccagttcgatgactcccagcgaaccgtttgcggctgagttctgggcggccgccgcgtttgcgacgttttccgcggaatcgtcggattcctcagcctcggtgccggtgtgtcggaacccttcgtcatcgacttcgggcatggcgccgggttgcttggcccaatcgcggatggtggctgtgcacagcagggtgggggtgccgttgatggccacggcgtccgaaccgcacatgccatgaccgcacgaataacggaaggccagcgtcgggtcgacggtgcgtttgatggtcagcagacaatccaacacagtatccgaagggcgcgcgggaatcgtgtactcctgcacccactgcttgccgcgcggacgacggcgcgccgccgaatccgagccgccgccgaacggggagcctttcttggcaaacgggctgccaccgcgtgcacgttcggcacgctcgggtcgcggcgtgaaacgatgcacttgcagggtaaccgtcgtgttgctcgcctcagccatgttctgcctccatgaaacagtgggatgtcaagtccaatattagccaacctattgtgccacaagccctaggcggcttgggtattaccaccagcggatcagtactcgcgcttcttgggcggatagtcggtgatgtgcaccggcttgaaacttaccgaaccatcatcggcgaccatcgagtgagcaaggaaatgctcatcgtcgcgttcggggaaatcaaggcgttgcatggatccgcgagattcctgacgggattcggaagcgtgcagcatgacctcggccagttcgatcagatgacggacttcccagatggcggtgacctcctgattgaaagcggcggtcttgtcatgggcccgcaaggtatcggcaaccggtgtgatgtcaccgttgatctgggtcaacgccgtatcgatggtctgagcggtgcaacgtacggccagagcctgctccatcactgatccgagttgggccatgagctgataaggattggcggtgggcactccatcgtctgaatcatctattggcccggcgagcagttcgtcaagctccgctttgcgagaatcggcagcctgatcggcggcatcggtcagcatgtcatcggccgaatcatcggccatgggggagtcaaccgggttctcggcgatgcgtgcggccatcgtctgaccagcgcgtgtgccgaacaggcaggcgtcgagcagagaattgccgcccagacgattcgcaccatgtacggagacacaagagcattcgccagcggcgaacagtccatcgactacctgcacggcaccgtcggcccaacggtacacctcgccgtcggtggtgatggggatgccgcccatcgtgtagtgtgcagtgggcttgatgggtactaggtccttggccggatcgaggttcgcgtactgctcgatggtttcgaccacctgcggcagcacttccttcatacgttcggggtcgatgccggtcatatccagccagacgcagtccttcggaccatccgggtccttcgggtcggcgacgccgcgaccggcgtcgatctccgccatgatggagcgggagaccacgtctcgtgcggccagatccttatgctccggagcgtagcgttccataaacggctcaccgtcggcgttcctcagaatgccgccctcggcgcgggccgcctcggacagcaggatgccggtgtgcgcgagcccggtggggtggaactgcacaaattcgatgtcctccagctgcagaccggcggccaaggtcaaggccatgccgtcgccggtcagatcccaggaatttgacgtggtgtggaacagtcggcccgcgccaccggtggcaagcagcacgttgcgcgcgtggatggcctgaatcttgcccgaatgcgtgtcaaaggccacgatgccggccgcctgcttgccgtcgtcggcgagcaccaggtcggtcacataccattcctcggcgaactcgacgccggcggccacgcactgctgccacaaggcgtgcagaatctggtggccgatgcggtcggccgcataggcggcgcgcttgaccggggcgccgccgaactcgcgcgtgtggccgccgaaccggcgctgggcgatatgcccgtcctcggtacgggagaaggccacgccctgacgctccaggttgatcacggtctgcggcgcgtattcggcgagcagtttggccgcatcctggtccaccagccagtcgccgcccttgatggtgtcgtagtaatgccagtgccagtcatcggactccacattgcccaggctcgcggcgatgccgccctcggctgaaccggtgtgcgaacgcagcggctgcagtttggagaccacgaggatcttcgggtccacgccttgttccttgagctcggtgatctcgggggagcgcagcagtcccaacgccgccgacaggccggccgctccggcgccgacgatcaccgcatcatacatatcttccaaacgtttcggactcatgggttcgattctcgcacacccgccgaacagccttcgagccgtgtcatggaagccgattagccgacacggctgctcagcttgagtatgccggcatcccgctcgatcactcccttcagctccaatgcgccgagtagctcaagtatggtgccgatattgggaatctcgtcgggtaccgtctctcgcgccacacgcaatagtgcgtccggggtgacgatgagatgtcgtttacggcattcacgaatcaatgccactaatgtgcgttccatttccggcagcttggcgataatgatacgttgttgggcttccttctcgggatcgggcttcggcttgacacgaagatccggcatctgatgcgacgagggaagctcttcacccttgcttttgtcgttaccggaatcggcagttgcgctcgccggcccatccttggattgagtgcgcgtaggctgagtatgcttggtcttcgaacgtttcgaatgacctgaatcttgtgacgactcctgtgacgccgatgattccgaggatgctggcgataacggagtcgttgccggcacttccatggcctcctcgttttcggacgagtcctgacctgtggatttcgatatgcctgggcatgctgccataacgggcttatgccgttcatggcatatatcctcggtggatgtggcggcacacagaatcatcgctcggtggtcgccgatcatcttattgcacccggcgttgcaaggctgattgatgtcaccgggaaccgcatacacttcgcgcagcaattcgcatgcccatcccgcggtgttgagcgctccggaacgcaaccgggcttgcgtcacaatcaatgtggaagacatggccgcgataatgcggttgcgaagcagaaaacgacgggcttcgggaatcgtcccggggcacagttcactgatcagtgcaccaccctgcgcctcgatgcgttcgaacagcgtgcggttacgcatcggtccgatatggttgagcccgccggcgaatacggcaacggttttgcccacattggcgggcattctgccgtgcagcgcattcaacgctccccaatgtgccgccgcatccgtgcccatcgcgcctccggacacgaccagatgcccggcaacggctgcctgttcggctacggtgtgtgccacataccggccatattcggtcacgtcccgtgaaccgacgatgccgaccggtttggcgcaactggtcaatgcgcgtggattgcctttgatccacaaacacagcggtggcgcccaatcggagcgaatggacaggtcggccaactgcgagggccaacatggatggccagggccgataatccattgcgtgccatccatagtgaaccagtcggccagttggatgatgtcttgcgagggcaggtccatcatgcggttatgccagcaggccagtgcattgcggaaggagcgcatcgcgttcgccgacgccttgcggccccatcgagtgaggccgtccacgaacatgcggtcaatacgtgacagcgccgggccgcagatttcagatggctggcttggatgggattgcgccaacgcatgccagagggattcggcgttttccgcgcctttgagcgtggcgtacatcatcacatccgcgccatcaagacagaacgtgagcgcggcacgatacaacgtatccgtgggaggtacgggaatagtgcgcgaaacggcgagactcgtatcggtgtgatccacacttcctgcggtgccgccagattgccggatatcagtagcgttactcatgtcatcctcgttctcatttcgatgccctgatggacgtcctgttcagtgggggatacgcggccggccagatcggcgagcgtccaagacagacgcatggcgcgatcagccccgcgcaatgtgagttgatgattggacagggcccgattgaccaattccatcgctttcagcgatgtattggcgtgcagccatttgcccgaagcttgcgcgttgcacacccatccatactgtctgaaccggtctttggccacttgacgggcacgaatcacacgagcttgtatcccggcactggactcgccgattggctcgctttgcgcggcaatgcgcgagactggtggcaccgccatctgaatatccacacgatccagtatcggtccggacaatcgcgagaaataacgtatacggtctttttcccggcaagcgcaacgttcgccggtgccgtaatagtatccgcacggacaggggttggccgccatgatgagttggaatgaggccgggtagtaggtgctgccttttgaacgggaaagcgccacatacccggattccaatggttcgcgcaacgtctgcagggcgcgtgcgctgaattccggtgcctcgtccagaaacagaatgcctcgatgcgcgcgtgtgattgcgccgggaacggcgatgccgctgccaccacccaccaaggccgccgtgctggcggtgtggtgcggtgcctcgaacggcggcatgtcggtgatgccgtactgaggcagtatgccgcacagcgatcgaatcgatgccacctccagctgttccgcctcgttcaacgggcacatgatgccgggcatacgtgaggccaacatggttttgccgctgcctggcgggccggtcatgatgagattatgcccgcctgccgccgccacttgcagtgcccatttggcatgctcctgacccagaacctcgttcatatcgccacaatcgttgggatgacttgtgggcgattgatccgtggtggtctcgtcggtaaccggtgtatcgggaatcgtataggtggcatcgccgcccatcagttcgatgagctcacccacatgcctcacgcccactacatccagtccatccaccatcgaagcctcgtcaagattgcgatggggaacaatcattttgcgcacgccacgttcctcggcatgcagcatgatcgggagcagcccatgaatcggcagcaccgagccgtcaagattcacttcgccgagcacaatggtatcttctaggcaatcatgccctatggcacccgccgcacataggacgctggccgcgatggccagatcatgcgacgaaccgcgtttgggcatggccgcagggctcatgttcacggtcacacgggtttgcggccaaccgaatccagtggcttgacacgctgatttcacgcgctcgcgggcttcggacaacgatgcatccggcaatccgatgatgctgaagtatggcaagccagggctgatgaaagcctgcacttggacgatgaaggccttaaggccgatcagtccgactgagagggtgctgccgatagccatgtctactcctttcacaatgtgtttcgcaacgtggctgtttttttttggggggggggcttcagaaggcattttcaatgtgatgcacgagcggcctgcccacccgaagcacgatggtgacgacatcgaaacggaccgccgaatgcggcacccgattacgccggtcaagtagccaatcgcaggcggctttcctgagattgtgctgtttcgccggcgtaatggcctcttgcggatatccgtaatgcatggaccggcgtgatttcacttcgacgaacaccaccgtgtactcgggattgagcattacgatgtccaattcgccgtaacgggtatgccaattgcggctcaaggtcgtccaaccgtgttcctccagccacgcggcggcatactgctcgccgagcgcgccgaactgtttgggcgtcagattgcggtcgcccatcgtggccgcaatccgttccgaaggcagcattgcctgcggatcaggtgaagccagcatgggctggtgaaaggcaagaccggcgtcgatgccggacttcgtcgtcggctgagtaggtggtaaagcgttcatgattccactgtgcgggttacttatgtaagagcacaagcgcaaccggcaaatgtggatactatgacgcggtttggcgtgttgtggataacgtgtggatgaaaactcggttatccaccattagttcagaaggtttaccaaggctcaccagtcgacttccctgtgacgaaaaaacaacccatcggattgttcgctgaatacgtcagacccagtgagcggagaggggagccaaggtgcggtcacttcaccaaatcggtgagttcgccaaggttcagttcgaaactgacgccacgatcctcgaaatgcggctggttacgggtgctgaccatggcgtgacgcacgaactcaccggcgatttcggccgactcggccaggccgcggccggccatcaccgcgccgcacagggcagaggcgaaggcgtcacccgtgccatgaatcatgtatggcaacttctcatgagccagctcgatcttgccggcaacaccggtggaagcgctggccacatagttgacgattttgccatcgccatggtcaatgcccttcagcaccacgttcttggcacccaactccagcagagcaccaagcagctcgttaaccgtggcctcatcaatatcctggccaggatagtcacgcttggtgagaatgctcgcttcggtgaggttcggcatcaacacgtcggcaccatcggccagcgcgcccattgcctcgcacagctccggtgtgtacgtggggtacatttcgccggcgtctcccatcaccgggtcaaccagacgcagcgcgttcggatattcgcggtagagacgctgaatgatcgccacctgatcggggaagccgaggaagcctgaatacacgccatccagctccacgtcttccttctgccaggcatccaagtaaccggagagaatatccgtggtgtcatggaacgtgaacactgcatagcgtgtgtgcgccgagaacagggcggtcggcaccgggcacacatcgcagccggcggccgagagaatcggaatcgcggcggtcagcgagcacttgccgtagccgcacatgtcgtgcacggcggccacgcgcggaatatagttcggatcacggtcatacagagttacatcggtcatgtctgttcgaatcccttcaccatgttggcggaataattcattggcgatgtttgactgtagtcgttcgtcatgtaaaccatgtaaccgggcggcagaaaaatgaaacagacgtcatcaccgagcgggcaaaccgtcttggtgacgggtggaacaagcaatcatcacggacacttgagccatgcgcgaaaggcatggcagcgatatcaccgtgaccgcagtcgaccttgaaagcgcatgcgtgcggcccggcgtgtcgcgataatttcaacgactttttcgtgacttctgacagtcgctcacgtcaatgattccaaggctttataagcccttataggcaagtccgataacgttcagcttgcgccgcgcggcccaagcgtcgtaacttcataaccaacacctcgccaaccgcccgaacacggcaggcgggtggcaaggaaaaatcctcgcgacctagcacaaccaaggagaataccatggccgagaacaacaagaagtaccgttttgaaaccctgcagctgcacgtcggccaggagcaggctgacccggccaccgactcccgcgcggtgccgatctaccagaccacctcctacgtcttccacaacttcgaccacgccgaggcccgcttcggactggcggacccgggcaacatctacggccgtctgaccaactccacccagggcgtgttcgaagaccgcatcgcggccctcgaaggcggcaccgcgggcctggccgtcgcgtccggcgcggccgccgtggaatacgcggtgcgcaacatcacccagtccggcgaccacatcgtcgcagccaagaacgtgtacggcggcaccttcaacctgctgcgccacaccctgccgcgcgacggcatcaccaccaccttcgtctccgccgagaacccgcaggagttcgaggacgccatccaggagaacaccaagctcgtctacttcgagaccttcggcaacccgaacgccgacctgcccgacttcgaggccatcaccgccatcgcccacaagcaccacctgccggtgatcgtggacaacaccttcgcctccccgtacctgttccgcccgctggagcacggcgccgacgtcgttgtggaatccgccaccaagttcatcggcggccacggcaccaccctcggcggcgtgatcgtggaaggcggcaagttcaactgggccgaagtgccgggcaagttcccgaccctgaccgagccggatccgtcctaccatggcctgaacttctatgaggccctcggcggcgccgccttcgtgacccgcatccgcgccatcctgctgcgcgacaccggcgccaccctgtccccgttcgcggccttcctgctgctgcagggcaccgaaaccctgtcgctgcgtgtcgaacgccacgttgagaacgcgctgaaggtcatcgattacctgaagaccgttccggaagtcgaatccatctcccacccgtccatcccgggccgtccggatcacgacctgtacgagaagtacttcccgaacggagcaggctccatcttcaccttcgatatcaagggcggaaaggatgcggctcgcgtcttcatcgacaatctgcacctgttctctctgctggccaatgtggccgacgcaaagtccctcgtcatccacccggcttccactacgcactcccaggagaccctggaagagctcgaggaccagggcattcaccagggcaccatccgcctgtccatcggcaccgagaacatcgaggacattctcgatgacctgaagggcggcttcgaggcccttcgcgcttccggcttggccaagtgaggtcgacaggagggttgacggcccgatgagaaggggcgcgatgctaatggggtgcatcgcgaatcatcgagccgcatggggtgccttccgtccgataacttgactcaaggagtagaaagctcgcactgacgtcatgcagtgcgggctttcttgcgtctgtatgcctcacactgtttgcgcagaggcatgaatagtgtgagacctgagacgacataatcctcaaggatgagggccggcgcgtggccgaccgcccaattcagtctggcgcacgatggggcgcgccgttatttcttcataagttggaatcatcatccgggcataaggcccggcccaatatggagaggcattatgaacgtgcagaacccgtccgcatcgcgcggcatcgttattcaggccgtcgacttggtcaagaactacggcaccggcagcaatatggttcacgccctgcgcggcgtgaacgtgagtttcgaacgcggcaaattcaccgccatcatgggcccatccggttccggcaaatccacgctgatgcacacgctcgccggtctcgactccgccacttccggccatatcttgttcggcggcgccgacctgacccgcatggacgacaagcagctcaccttgctacgtcgccacaagatcggcttcatcttccaaagcttcaacctgttgcccatgttcaccgcagagcagaacatcctcatgccgctgactttggccggtgataagcccgaccgtgcctggttcgatctgctcgtagaaaccttgggactcaagcaacggctcaaccatcgtccgaacgagctgtccggtggccagcagcagcgcgtggccatcgcccgcgcgctgattaccaagccgaagctggtgttcgccgacgagccgaccggcaacctcgactccgtctccagcgccgaagtgctcggcttcctgaagcgttcggtcaacgaactcggacagaccatcgtcatggtcacgcatgatgcggtcgccgcgtcttacgccgaccgtgcgctcgtgttcgccgacggccagatcgtggcggacgtaaacaagccgacagcagaccagatgagtgaactgctgatgaaggaacgtgaggccgccacaatgaatgtggcttccgcgagacattcccgctaaacgcactgtagaagcattcgaagaagggaacagaatccaccatgtggtccatcactttgaaactcatgcgaaaaaccaagcgcatgctcatacccgcaggcatcgccatcatgatcggcacggcgttcatcgccagcaccttcctgttcggcaatgccatgaacgactccctgacacggcagctgaccgccatgttcggaaacgccaactatgcggtgagcatcaacagctccgacctgagcgataaggaactcaacgaggcgtattccagcactgtcggcgactttcatctcgaccagatcgccggcatcgaaggggttggcggcgtccgtgcctcggtggaaaccggcgtcagcgtttccaagggagacagcaccgtcagcggcgagatcatttccaccgcggcacagaagaacatgctccccgtgaatatcacggaaggggaccagccgaaggattccaacgaagtcgcgctgccggaagacatggcgaaacagctgaacgtcggcgttggagacactgtaagcctgacctcccgatatgcggtaggcgacgatggcaaagccaaggcggacaacgtgcgcgtggtaggactcacatccgatccgaacggcgcctactcatactatggtggtgcgatcgtaggatccaacaatctgcttgccgcaatgcagggagtggacgatttcaacgccaccggaacaacaatggtgtatctcgaccttgccttggatggaaacagcgtatccgcaaaaaccatcaacggtgtgaaagcgttgctgccaaagcatttcgatctgatgtcacgacagcaaatcagtgacgaaagcatcaaatccttaagcggcaaccaaaccaacatcgtcaccacattccttatgtgcttcggcgtgcttgccatgttcgtggcggctctggtgatcgccaacacgttccaagtgctcgtggcgcaacgccgccgcacactcgccttgctacgcaccatcggcgcaaagaaaggccaactgtatggttccgtgctgttcgaagcggtggtgctcggcttcgtcgcatccgtgcttggcgtggtgctgggaagcctgctcatgtggggcatgtgcgtcagcgacatcatgcaagagggtatgcgattcaatttctcttggcaagccgccgtcgtacccattcttttcggtattgtggtgacggtgctcgcatccttgggatccgcacgttccgctactgcggtgacaccattggaggcattgcgcccgatcgaactgaccgacaaccgtcgttccagcctcacgcgagccataatcggtattctgatggtggtggtcggtatcgccatggcagtattttccatctggcaggtacaagccaccaatggcggcgaggaagcgaacagcgatcaattcacgatgattctgctcatagccatcgccggtgccgcactggtgttcctcggcatggtagtcaccgcggtgttttggatgccggccctcatgaagggcgttggagcgttggcctcgctgacaggcccttccgcaacggttgcgcacgccaacattcagaagaatccgcgacgcatcgcagcaaccggtgccgctctgctcatcggcgtcaccctggtttccaccatcgcaaccggtgccgctagcgccaaagagactatgaatggtgcgctcgccacccgttatagcgtcgacatcgtggccatgggcgatgacatcagtcagcaaatggtcaaggatgtagccgacatcaacggcgtgtccgacacattgtatgcgccggcggtttccgtgaccttggagaaagcggatggaacccagcctacgtccgcattgctggtcggtgtgaagaacatcgatcaggtcaagcaggtcatgcgtgccaacttgggtaacgcctccatcgacagtgatagcgtgctcatgccaacatacaatgcgcaaaccggcaaggaactgcagttcgccaatggcacggctgatttctccaccgaatggaatcaggacggcgtcactacgcgttcgctgacattgcaagcaaaccaagccgactaccgtcgcgtatccgcacagtatggagctgtcggattcgtggatgaaagccatttcaccaatggtgaccttgacgccgccacccatgtgttgctggtcaaggcagatactgacaaatcgggagtttccgttgacggcatctacaacaacatgcaggccgcattggagaagagcactgatgcaacagtgaccggaccgattgccgaacgcatcgaatgggcgaacatgatcgactccatgatgatgcttctggtggggttgatcgccgtggccgtgctcatcgcacttgtcggcgtagccaacacgctgtcgctgtcagtgatcgaacgcacccgagaatccgccacactgcgtgccatcggcatgactcgaggccagttgcgacgctccctcgcggtggaagccctgctcatctcgctggtatccggcatctcgggcgtactacttggcacactgttcggctggctgggcgcatacgtggtgttcagcatgtacggcaaagtggtgttcccgttcgaatggggcattaatggcatcgtactcgccgtggcagccgtggcagcactgctcgccagcgtattccccgcacgcagggcagtgagcacgcctcctgttgaggcgctcgccgaagcctaagcttcatagcaaacacaacgaaaaggactcctgccacaaacatggtaggagccctttttgcgtatcatgcatacgcaaaacaacaaatcaatcagaccaaatggttttcataggcgaacaccaccgcctgcacgcggtcacgcgcattgattttcgacagaatgtgcgccacatgcgttttcaccgtcggcaggctgatgaaaagcttgtcggcaatttcctgattcgacaatccatgcgcgatctcaataagcacttcgcgctcgcgatcggtcagctcgtccaattccggatcggtatatgttgaatccgtagcagaagtagttgcggaattttcaggcctaccgacgttcgtagccatgaagtcgccttccatcattttctcgataagacgtttcgtggcggacggtgcgataatcgcattaccttgaaaaaccgtgcgaatcgaattcagcaacgtttccggttccgtatctttcagcagaaaaccggaagctccggcagtgatcgcagccataacatattcatccaaatcgaatgtcgtcagaatgatcactttggtatgagtgacttctgattgcgttccatcggcagcaaagcgatgctgcaacgcactgatctgccgagtcgcctcaataccatccatgccgggcatacgcacatccatcaacaccacgtcaggatgcagcgtttccgccaacgccacagcctctgcaccatcgcgagcctgcgccgcaaccgtcatatcaggctgggagccgatcaccatggcgaaaccggcgcgtaccaattcctgatcatcggcaatgaccacacgaatcttctgttcttcactcatactctccaccttatcggcattgttccgctcacagcgcgaaacaaacccttaaatctccctgaaaaacttgaatcggctatcgaggcacgcgctgcagctgctcctccaatggtgctgcgggcctcaactgcagttcgctcgcactaccggcatgagcgtcatcgctgaaaccagtctcacgaagcacgccaagcaattcgcgcatacgcttaagcgcggcgcgcccctgctcgccaatggctttgaacgctgcggaaatctcgtcggcggtagtctctttgccttgtgcttcggcgctatccagcatgcggataccatcgacggcttgactaatcacgctgttcaacgtggcggtgacttcagcctgaatgctggcactgatacggtcacgttccatattcgccgcgagaatacgctgcttctcctgctcggccaccagtgcctcttcgcgagcctgcaacaccagtgcgtttgaatcactggaacgcgcccaacgtgcccacgccatgatgccggcgcacagcatcagcactgcaaccgtatacatgacgccggtaaagaatgctgcactactacttgacgtggctgaaaccggttttgttaagcccacggaagcggcgatggcgccgaacaaggtagtgtatccgtgttgatcagctgcgattttcaagcccatcagagctgaacaggtgacagcggcaagaccggtccaacgccatgcgtgttcacgcccatacaatacggctgaatacagcgcacacagcgacgctacgatatgtccaacctcaatcaatcccaaaaaaaccaattgcacaaccgacaatacgaacacaataagcgcgcaagtctcggggaacctgcgtcgaagagccagtgccagcaagcagcatgcggcgatcgcatgagagagctgcgcatcgcgtgaactatcaaaaaagaatgtaatcgacatgcgattcagcagcatgaccaataccacggcaccaacggaatccatgagcacataatggtgctgcgtccacgcggaaacacgttccacccaattcagccctcgcgaattggatgtatttgcaagttctacggatttcagtttcagcgatgtgagcaaatcatgcagattgggtgcggtgatgcgcaagtgttgcagggcgttcgaacgatggtcgcgaccggttggttggttggtttcctgcgtctgttccgatggttgatcggggattcgcgccgatatgttgacggctgtgtgagatgcgattgcttcgtcggataatttcgctttgctggatatggcagttgtgttgcaagattcggactgttccgaggcatactgttcgccggtttcgtctgtcgctggctctttaccgccgtaaggcagggtggccataacttcgaagcctccgccgagttgagggccagcctgcaatgagcctccggccgattcgatgcgttccttcatgcccaacaggccgtaacctggcgtatgcccgtcgatattggccgccgcgccacgaccattgtcggtgacggtcaaagtgagtaaaccgttgttccatgactctttaatatgcacatcgacgtgcggccccgcatacttgcggatattcgtcagcgcctcctgcactacatggtaggaagctatcgaggcttgttcaccgagttgttctgggctggcggtgccggtgatattccatcggattcgaatgtcgggggagacgtttcgcgcttgttccacaagattgcctatatcgttataatcggcgtgcggtgaacccccgaatactcccagaagacgttgcatgtcatgcagtgcgcgttccgattcgtgtcgaatcgtctccatggtgtttctagccaccgcgggatcatgcgtgcctgcatagcggccgccatcagactgcacgatgatgattgatagggtgtgcgccaccacatcatgcatgtcgcgtgcgatgcgtgctcgttccgccaacgcggcgatatcgcgttcgtcctggtctcgtgcggcgatcgcctcattgcgttcccgcatcatacgaacggttgccagacgggcacgctgccagaacgctacaatgacggtggaaataatgcatatttcgaaaatcggcgtcagcaccaacatgtattgcgccaccatgttggcgacttccgacatggatgttcctgtgtagatggagccgagagtgtcttccgtgaccattgagccatttggatttgagccattccaactgctccacgtatgcactttgccaccggtgagcagcggcccattggtcatggtccatgccatcaacgccgaagccagaagaccgatggccaacgctagaataatgaaggctttcgtgtttttgggattgccgtagacgatcaccgaatacagcatgaccaatgccagaatatcggcgcccaatatgcaagggccgaatatgagatgcgtcaaggccaatgccacacagagcaacgctccggtctgtggccgccatcgacggatcagcagcgggatcagcattgccgcttcccacgccatctgtatggaaggattaaggtcaaacagcaatcccggattataggtgatgctgccggtcacgccgaacagcagaacacctataacaagcgtgaggatgagatcgcctgcgaagacatgaccatgcatccacgacaggaaacgctgcttgaaattcgacatacgctccaccctagcgccagatatgctgtgacgccatcgtgcgcaggaatgaaataacggtaagataaagccgcttttgtgaggtaaggttatctccgcatgtgggtgagatggaatccatcaagaagtcactacccgcattgaatatgccgatgacgccaaaggaaaggtgaatgcatgacgttgctgagcgaatactacgtgcccggattgcatattgaggatcgttccatcaaggtgccgttggattgggcgggtcacgagcccggtcatgggttcgatggcgaatcgatcagcctgttctaccgtgtggtcaccgctcccgaacatgtgcatgacgacctgccgttgctcgtgttcctgcagggtggtcccggtggttccggtccgcgtccgctcggcccaagttccgatggttggatcgaggaagcgatcaagcatttccgcgtggtgttgccggatcaacgtggtacggggcgttcgtctcgtgtcgacacgcatgtgattgagggcatggacggcgacggcaaggccggtgccgcgtttttgaagcgtttcctcgctgattcgatcgttcgtgatttcgagcatctgcgtcgcaccgaattcgggggcgcacgttgggtcacgcttggtcaaagctatggcggattcctgacgttgacgtatctttcgctgttcccgcaaggagttatcgccagtttcaccacgggcggcattcctcatgttcccgccgatgcgaccgacgtgtaccgtcatacgttcccgcgcatggcggcaaagacgaagcagttctacgagcgttacccgatcgatatcgaacgtgtcgtggccgtcgccgacattctgcaatcgcgcaaggtcacattgccgaacggcgacccgctcacggtggaacgcttccaatgcttgggatccgatttcggtatgaagccgagtttcgaacgcgtgcattggattcttgaccaggcattccttgacggcgacggttcggcctcgacctcggcggaactgtctgacgaattcctatcttccgtgatggaggcgacctcgtctcgcccactgtattggccgttgcaggagttcatctacgccaacggcgagctgaaaacgccgatttgctgggccgcccagcgcgtgcgcggcgagcatccggaattcgcgggtgacatttgtccgcttaatttcaccggcgaggccatgttcccgtggatgttcgagcaggaacgtgcgttgcgtccgttcaaaccagccatggatgtgcttatggaagacacgcatttcggcacgatctacgatgccgaccagttggcgcgtaacgaggtgccgttgcaggccgccgtctatttcgacgacatgtacgtcgactccggtctgcaatttgatacgctgtcccgtgtgggacgatcgcactattggaccaccaacgaattcgagcacgacggtgtacatggttccgtggtgttcaagcacctgttcgacgaggcgttgaacaggggagacctggaagaactgttctgacattcccgaaattctccgaaaccatcgcatccaaaacaattacgtccattagaaaagacgacaaggaggacaccatgtccaatccaaccatcggattcatcggatacggcaacatggcgcaggcgatcgccgaaggcctggtcaatgccggcacaatcagcggcaacgacattgtggcttgtgcggcacactatgacaagctggaatgtaacgccgccaaacttggtgtgaaagcggtgcataccgctgcacaagtggccgaagccgccgacgtggtcgttatcgccatcaaaccgtatcagattgaagcggtgatttcaccgattgttgataagctggcgcagccaaacaccatcgtcgtgtccattgcggcaggctgggatctgaacaaattccgcgacctgttcggaacgtctttcgaacaggcacacatccaatgcaccattccgaacacgccgatggctgtcggcaaaggcgtgctggtcacggaaatcgacaacacgctcacgcaggaacagacggaaaccttcgaaagcctgttttcgtcaatcagcctgattgaacacgtggacaccgcacacatgggcatcggcatgtgcatcgccggctgcgcgccggccttcaccgacatgtacatcgaagcattgggcgatgccggtgtgaaatatggtttgcagcgtgccaccgcgtatcgtctggccgccaaaatggtggaaggcgtgggtgcgctctatctggccgacgaaacgcatccgggtgccatgaaagacgctgtctgctctccagggggcaccaccatcaagggtgtcgcatcgttggaggaaagtgcgttccgaggtgccgtgatcaaagcggtcgacgccatcgaagcctaatactaagctaaggaaccatgtctcttactatcggaattgtcggactgccgaacgtcggcaagtccaccatgttcaacgcattgacccgtaacaacgttctggcggaaaactatccgtttgccaccatcgaaccgaacaccggcatcgtgccattgccggacaagcgtttgcccgtgctggccaagctggtccacaccgaaaaggtcgtgcccgccacggtgaccttcgtggacatcgccggcatcgtcaagggcgcctccgaaggcgaaggcctgggcaacaagttcctggccaacatccgcgaggcggacgcgatctgcgaggtcgtgcgcgccttcgaggacgatgacatcgtccacgtcaacggcaaggtggatccggccgacgacatcgacaccatcaacaccgagctgatcctcgccgacctgcagaccatcgaaaacgcgctgcccaagctggagaaggatctgaggggcaagaagatcgagccggcctacatggacgcagtcaagcaggcaaagaccatccttgaagccggcgagacgctcgacaaggccgcacgcgaaggccgcttcgacaaggattccgtctacgacctgcatctgatgaccgccaagccgttcatctacgtgttcaacgtggacgacaacgagctggccaacaaggacctgcaggctaagctcgccgcatccgtggccccggctccggccgtgttcctcaacgctcagttcgaggcagacctgaccgagctcgacgaggcggacgcccgcgaaatgctggccgacgctggcttgagcgagtccggtctcgaccagctggcccgcgtgggcttcgacatcctcggactgcagaccttcctgactgcaggcgtcaaggaagtgcgcgcttggcagatccacaagggctggaccgccccgcaggccgccggcgtgattcacaccgacttcgaaaagggcttcatcaaggctgacatcgtctcctacgacgatttcgtggccgtcgacggctccatggccaagatcaaggaggaaggcaagctccgtcaggaaggccgcgactacgtcatggccgacggagatattgtggagttcaagttcaacgtctccaagtagttttcctcggctcccctctctgaggggagctgtcgctgaaagcgactgagggggagtgttgcggaaaggtccgagcagtgttggttgcccggacctttcttcatgttacgaacctctatgaacctcgttgagatgaggtgtttgcgtccacctttcttgggcttccgcgttctcgtcgactcctgtgacgagaacattcctcaatgatttcgatacctgtattttcagcggacgttttccggtctgtacgaccagccctgcggcccctgtatttccacatcgcctttccggaacaggtcgccgtccggctgatcgctctcatcgatttcgtcgagcacgaccttgtcatagatgtcgcggatgtcggcgatgcccgctccgcgataaacatcgtgacgagacgcaaagagacacgataaaccgcctcagtgtttacgaagagcagctataggcggtttcaagtatgcagtattgagatggattatgcggcgagttccacgagtgcacgctcgtctagtttggaataggggatgacggtcactccgttggagtccttcttcgtgtcatcccgtccgaacatgatgtctttcacggcgtccttgtcgaatcggttcggtgcctggcagaaccgggtcggatggttggcgctaggacagcaccctcttctgttctgtaacggcatcagtacaatgttcgtaatgaacagttgttcgcgcaaggaaatgccggcatatggtgcgtcatgttcaaagcatagagattcattatccggcctccacgagaatgatttggttctagcgcaatacatgctttcacgacacatgctttcgtgatacatacgttggtcagaagatattgcgctagaactcagcagtcaccgcacgtggtccacgatgtcattgaccttggtcatatcgatatcgcgctcgccgaatgcctgccgctcgtaggccaggtcgatgtggtgttcgtgtgcgtaatcgatgatacggcgagccaaatcggcaatgtcgccggacttgttgaaggaacgaccacgcagcagcacgcgttgcataagagggcgcatcgccttgaccaacttgtaccggtctgacttcaccttcaccatccaaccgtcggcaaaatatagcaccacgccttcatgcgggcttgccttggcgtcgccgattgcctgggcgacttcttccggcgaatggcagatcgccaccgtttccggccgcacgaagccgccggcaagagtgaacgtttcctcgtgagcggcatcgatggagaacgattcggcattacgaatcaaatgcagcaagcgcagcccggatgattcgtatccaacgatgtgccggtcggactcgcgatcgatgacttcaaacgccgccgtgacattccactcatgcaacatacgccacaattcggcacgtaccgctgaatctgaaggaaacaggcgctcgataagcgcggaataatccgtttgccccgacttcgaccagaagcggaacaatccaggagttcccgccgcgcccacgagcccgagaaatccgttctccttgcgctcaacgcgcacgggcaacgactctggatgttcttgagcgtgattgacgacttgggcgaacgatgtctcctccgtctcgtccacagcaaagaacttctcgaacccgcgttgcaccacctgaccgttgccgccgacaaaaagccctcgcgcattgatggtgcgatccgtccaccgatgttcacgaaatgcctctgcagtgaaattgcacgcatacacgtctgtttcgccgcgcaccggaataacccgaacgtaagggtccgcgcgcatacgctccaacaggtttccattcggatcgcccggttccaacgggcggaacatcgcggtgtgaaaatgcttccaggacgaacgaatgtaatcttccggaacacggtcagcggtatcacgcgccgcattgcgacgcaacaattcgtctagaggaacgtcaaaatccctcgtttcccacagtgcgccatgacgttgagcgagtagcgccagttcggctgcataccggggattagcgtgttgcgcatccgccaccacatcccaccccgcatccaatgcgtcggcaatcatgtgccgtcccatggcaaccaccatgtcattgaatcgcttgccgtgctcggattgcagtcggtttcggacctgtgccgagccggcgatcatgagccgaatgtcatcgagagaaatcacgcaatgcggccacgtgttggcggggtcctcacaccatgagcgtgcccacgtggacttgcccgaagcgggcagtcctcgcagaataatgagctttgccatagccaagctcctttcgttgtgctgtggggcgagacaggtgccagcgatggcataaggttctgctcgccccaatattgcttgtattatgattcggctgccgaaaccgagccgcctggttcctgctgtgcggcggagtcaatgggcgccggcccgggggagtcgggcatatccagcggtgatacgtgcgttgaatcggtcgcgtgtgcatggaaccagtcggcaatctgtgtttcgcttaccggttgcagattccatgcgtccagtccaacgttgagggcttcgtggcgtgcgccctccggagacagctggtgcgtgtgaccatacagcagacgatgtccgtcgaacggcaatgcctgatcgcggaaacgtacggcatcatccggccagccataggcaagatcctcacggtaggggaaatgcgatagattgacggtctccgttgcctgcgggcggccaattccgagaccggtcagctccgccgtgctgttcggctcaatcgattcgaacagatctcgcgcgggtgcatcgtccagccaccagtcatcgtgattgccgataaccgcgtgcagatgcctgcagcgcagctgacgcaggcagctcttcagatgccggaccgatgttcggtatccgatatcgcccaaaaaccacagctcgtcgtcctcgccgacaatccgattgatattggccacgattgcttcatcgtgcgcatcggtgtctgcggccttgcggaaattgagccgggaatcgtcaagcaccacgcccttcgcccaatcctcggcggccttgcgtccctgcgaggagaggagagcgtcatactgcgtgtgcccagggtcgaacgtggtgaatccgcgcagcacgctgaccagcggatgcccgaaatgcgtgtcagtagtgaaatacttcatgatctgttgttctttctgaatatgtgatggtatgcaatgggttttgctgcggtgcattgagttgcgactatgccaagaacgcatgctcgtgcaggtgcgtttatgaggcatggtgcgaacgagtcggctcgatatcaccggcaatgattcagctatgcgccaatgagaggtgtactgatcagatttgtatggcagcgagcaggctgcgcttgtttccggttattggctggaactgagcagtgcgcaaaccctgtttgaaggcgcattcgagcatcgccggcaggttcatctgctgacgcttggcgtgttcgttcacgccgttgctgctgaatgcgatacgttgaatcatggtgtgcacaccataaggtcttacgtccaaatccgtcaaatcacggtgtgtgtaagcaagttacgttttggtcattcatgggggcttcttcgcgaatccgtcaaactacgcagtgtgcatgtatggtcatgtaccgcagctacgtaattatgagtacacttggcctataagtgcaacgaagcacttgccgtcgatgacggacatcatggcaggtgcgtgaaaaggggagcaacaaccatgggcaacatgttcgataatttgggcaaaggtcttaatgatttcaccaaacaagccggtaaaatagccggaaatatcggtgacacagcgggaaaaatcacgaaagatgttgccaaaggggcaggtaagatcgtcaacgatgcgggtaagcttgccggcgatgcgggcaaaatgacggcagctgttgcagggagcgtggcacagtctgcggccgtcgcaagtggcgaagtaagcaaagcggctgacagcatggcaaagggtaccgtctcaatcgctaaaaacgtcaaggatagtgccgataaggtcgatttgtttaattccaaactaagagctaaggctgtcgaggattacaacaatgccgtagaacgctatgaaaacgtagcggatgatttagctaaaagtacgcaagcgctgtatgacttgagaaaaatcgctattgtgcatgtcaagtatgttgaacaacatatcaatcaattggctaatacgccaaaagaatttgccgttgaactgcataagatcaataccgaagtaacgacgttcgagaataaagaggatgagattaaggaggcagaaaagcaagcaaaagcagctgaaggagggtctggagcaggggccaccctcagtgctttgggaatcgcagtagcaaccatgggacctacggctgcaatgggtgtggccaccaccttcggtgtagcttcgaccggtactgccatttctgcattatccggagctgcagcaaatagtgctgctctggcttggcttggtggcggtgcattggctgcaggtggcggtggcatgtcagccggaaccgcgttcctgggcctggctggtccggttggatggaccatcgctggcgtggcgggcgctgcggcaattggttctggtatttatgcgaatcataaaaacaaagaaactgctgacaagcttttgcttgagcgccagaatgggggctgcggacgttttcttggagactgagcgaaaggtttctcgtatgttcagtcttgaggagcgttcgagggcggtggagctatacctcacaacgccgatgaccaccgcgcaggtggtggagtgcctgggctatccgaccagacagtgcctggaacgctggctggcgatggatccccggtatgctggccgtatggccaaacccataattcctctggagacaagacggaaggcgatcgaactggtgctgggcggcatgcagcagaagcaggccgccaaacagcttggcgtgagcgttggtgcggtgcacaactgggtcagggcgtaccgcaggggcggcatggccgcgttgcagccccggaaccagaatgccgcccagggcgggaaatcggcgtccgtccgtcctcggggcggggcggatgccgggggcggcgatgacgtggaggcgttgcgccgtagggtcgaggagctggagttggagaacgcgttgatgcgggaggtggtggaggctcgtaaaaaaagacccaggcgccgacctgcggcgcctgtcgaacagggagaagacgatgctgatcgaccggctgaggccgaggtattcgctgaggtcgatggcctgcttgctgcgcatagcgccgagcagctaccactaccaccatgccaggatcggcgttgacaagtacgccgggctgcgcgcccgcgtggcgcgggcgttcgccgactccaagggcaggtacgggtaccgtcgcgtcaaggccgcgctcgggacgggcgtctcggagaaggtgatccgcaggctcatggccgagggcgggctctcggcgcatgttcccaaacggcggcgttacagctcctacgagggggagaccacgcccgctcccggtaatctcgtcaaccgggacttcaccgccgaacggcccaatgagaagtggctcacggacatcaccgagatcaaggccagcgacgggaaggtgtacctctcgccgatgatcgactgccatgacggcaagatcgtcgcctacacggccggcttccatcccaacgcggagctcgccaaccggatgctcgccgaggcggcggagacgctgcccgacaacgcccgtcccgtggtccattccgaccggggatgccactaccggtggcccggatggctggagctcatggaacgctacgggctgacgcgctcaatgagcgcgaagggctgcagccccgacaacgccgccgcggagggattcttcggtcgcatgaagacggagtccgtctatcccgagcattgggagaaacgcacccgcgacgaggtgcttgtcctgatcgacgagtacatccactggtacaaccacgagcgcatcaaacagtcgctgggctggatgagtccggtacaatatcgtcaaagccaaggaatggctgcatgactatctccaagaaaacgtccgcagccccatgtggaagtattaattcgcaaattcaatgcgaagaatgccgaagtcgcggcattgactgaggcaacgcaaactcagatagatggtgtacagcgtgcgaatgctgcggtgacaggcgccgattacagccagttctcccacgaagagaaaatgcaggcgggattactggtcaatatgacgctcaccttagcgcaaatgattaacaaggaactggaactcgatgactgacaagaatactgctgacaagcacgccatcgataacaatgttgctcagggcattgccgcgtatattgattatttgaatcagctacgtgtgtctactctgatggacacattgagacagattcttaataatgaaacaggtcagctgaaagatctcgccgagcgacaagctaatgcgctaaggaaccttgatttagcgaatcaaaatgtcatgaacattgtcaacagtgggcgtggtggtgaaaatggtatgcatggatttatcgctgaattcgcgcagacgggaatcgctaacgccagacgagcatttgaagggttggaaaaatcaacaattacgcttaatgataatggtcctgctgatttgttgattaacggcaagccagtgcaggtaaagttctatgcgaacctaatgaacgagctgaagacatctgcggaataccgttctatggatatgatgttttcaaaggaccacatggacatttttcgtgcggtcatgcatggcgataaagaagtctttctcaacggacaaccgctaaccagtaaccaagtgcagaaaattaagcagcttatcgaagaggaaagtaacatccggggactgtcctgggacaaatggatgcaatcatcggtattgaaatatgatcaggtccaaagagaagcgattgaccggacttttactgaagaaaccgacaatattaaacggcagacatccgagcaaaagagcgaaatctccaataaggccaatacggataaggctgctgcatatcacaaagctcagccgaatctaggcgaggctaacaaagctgccggggtgggtgctgctatccaaggtggattgaacttcggcattttcgtgtatcaaaagcacgaagaaggcaaggaaatatggcagtttaccgctgaggattggaaggaaggaggcgtcaagacagcagagggtgccttcaaaggcgggttttcgggctatgcaatttatggattgaccaatgtctgtcatctttcggctccgagcgcaggggcgatagcgtccggaacttttggactcatagatgctgtcatgaaattccgttccggagagattgatgatgacggtttcttgagcttggtaactatcaatgcccttgatgctaccggcgcggcggtaggagcggcgattggtcagacgcttattcctgttcccgttgtgggcgcgcttatcgggtcaattgtcgcttcgaatgtgcttggtcttggcaagaacatattgagtgcaagagagcgggcaatcatcgctgaatatcagcgcaaagcggacttgttcgtcgcgaatctcgacgtgcaatacgcgcaaatattggaaactcttctcgataaataccggaaactaggggagctgcagacttatgcattcaatcttgatttaaatatacagctacgtttcgccgcatctgttgatttggcaagattcattggtgtctctgaaaccgagatattgcacaatgaagcagagattgacgacttcttcctgtaaggggagatgttgccgtaattgctgtaccaacgactagacgttggtacagcaacaatctttggttttgtaggtatgtgatttcgagtaattcacaaactgtagatctgtgcgccgaacggccagagcgcgagcttggccattttgaacgactggatgccgaacggaatgccgatgatggtgatgcagttgagcacgcctgcacccagatagccgagcgccatccagcagccgaccagcaccacccacaggatgttggccaaggcagagccgactccgccgccgtattgcacggttttgccaaacggcgtcaaggtgagtcccgccatcttgaacgcttgaatgccgaacgggatgccgatgatggagatgcacagaatcagtcccaccaatgcccatccgattgcgatggccaatccaccaagaatgatccacaggatattgccgagaactcgcatgattagtccctttccgattccggtcgattccgcgcatgttcagcttcactattttgccagaaatcatgacggaaacacgagacgcaacccttagctcgcccctgattcatccccggaccgttattcaggcggagcgtatgcggtaagcccaatcctcttgtgaagattttgtgtattgtcgagcatgcgtgggtttcaccgtcgatttgaatgatgataggcttctcgatgcctgccgtacgaagactcatcaaggagatgccatgaacctgtatcgctacgcgatgttcatcgcacgcgcctgccgtgggtcgttcgtcggcaatgttctgtttgccaatccacaaatggccctattctcgatgctggtgtagcggggatacgccttatgccgggatgtaccgatggcccatccgcagtcgacgtcgcatgaatcgctcaccatagccatcaacttacgcaaagccgcgaatcgtttgccgtatatgaatgcggaacggatggcggcttttcctttaccccggactcatcggtgtcctcgcgtcttgacacaagcatggggccggatcgcccacacatgccgttaccaacagaaggaaatgctgtgacctcacagaaaaacgcggaactcgggtccgccaccagttccgtaaagtctattgatccgcacacccgattcatcgttgtgggtgtgatcgtcgtcggctcgttcatcgcgctgctcaaccagaccgtcatgtcaccggccttgccggcactgatgcgtgatttcaatatcaccaccggcaccgtgcagtgggtgaccagcgtctacatgctggtctcgggcatcatggtgccgatttcaggctatctgattgataaattctccacccgaaagctcttcgccggagctcttgccactttcatggtcggcacactgctgtgtgccgtcgcgccgaatttcatgctgttgctcgtcgggcgcatactgcaatccgccggctccggcgtgctgttgccattggtcgccgtagtgccgatgctcgtctatccgccggataagcgcggcaccgccatgggcatggccggtatcgtcatggccgccggcccggctatcggcccggttgtcggtggtctggtgattgacagtttcggatggcgcccgatgttcattggcatcgcagtcgtggcactggtcatccttgtcggaggcacgatgatgctcaagaacgtcagcgagttgaagaacccaaagctcaacatcctgtccgtgatcctttcgaccatcgcgttcggtggcctgctctatggcttctcgtccgcttccacgatgggatggaccagtccggtcgtcattacctcaatcgtcgttggtcttgtggccttcgtcgcattcgtatacaagcaagtcaagctcgatgagccattgttgcgcgttgacacccttgccacccgcaacttccgcaactccgcgattctggtcactctgatcaacgccgcagtcgccgcaaccaacgtgacgttgcctatcttcatccagaatgtgctcggccaatccgccaccgtcaccggcatggtcatgctgcccgccgcggcgatcggcatcatcctgagtccggtcgccggtgccgcattcgacaaattcggcccgcgaggcgtgggtatcggcggccttgcgctcatgaccatctctcttggtcttctcggcaccatcaacaccaggacatcagtgctgtttgtcgccgtgttctgcgcattgcaggcatccggtcaggctatcgccaacatgccgataaacacttggggcgtcaacgctttgccgaacgacatgatcgcccatggaaacgccatcgccaacaccggccgccagatcgcggcagccattgcgacctcgcttctggtcaccgcagaaacatccgtgaccgcctcgcacatgtcccagggtgtgaagtccgccacggccagcggcatcgcgttctcctacctgctgtgcgccgccatctcgctgatcgccctgatcatctgcatcttcaccgtcaccagccgtgccaaggaggaggccgcacgcaacgccaaggcctacgaggcgcaagcctccgccgaagtcgcggccgaacccactgaaggccagcccgccgagcatcactacgccggcgcatacgtggcccccgccgcctccctgttcaagcaggcccaggaacagtccatcggcgagatcatggacgatcagccctacagctgcctggacagcgatgacatcacgcatgtggtacgcgagttcatccgcctcaacgtctccagccttcccgtggtgaacggcgatggcaggctcgtcggcttcgtcagcgacggcgatgtcatgaaatcgattgccacctatgaatcccgtacggtttccaccggcaccggttcgacgatggtggtgttcgacgacgaaaccgtggcctccaaggtgcaggcgctttccggcaagaaggtgatggacatcgccacgcgtaaggtcgttgccgccacgcccgaccagcatgtcggagaggtggcccgaatcctcgccaagaagcagttcaagaaactgccggtggtggatggtgatggcagactcgtcggtgtgatccgccgtaagtccgtgatggaacatgccttcgatgcgctgttcccaaaggatgatcggtgattaggcgccatcatcgctgaatagaatgaatggaacatgaggcttcccttctcgcgggggaagcctcattgctttgtccgcggagtcttacggcacctgcgcaagggcaacgtcacgtcttcatgatatactattgaatagtgtgttcctctcgttgcatggtgacgctaacgcatggcgtcacgatactgaagcctgccatctaacggcgggtacggctcgttgctggagtcgtgcacgcatacgcgcgtcggcgtgcgtatgccgtgatgtgacctttgtagtggaattgaagaatggaaaacactcgtatgtcttctagtagtacaacaactgaaccaactgtgcgcgaaacacccgaggtttccggcgatgacaatgcgaatgcgcgcgcagcggtccatagcgcgaacaaacccggtgccgcctatgccgcagcagtggccaacggggaatccgagcgtgcgtggatccgccgtgtagtgcttctactcaccggccaggcgttctcgctgctgggctccagcatcgtgcagtacgccatctggtggtggatcgtattgcagactaaaaccggttcggcgatgctgctggccaccctgttcggcgtggtgccgcaggccgtggtctcgatcttcggcggctcatgggcggaccgccataatcgcaagttgctgattatgctgccggatatggtgattgctgtggtcaccgtcgtgctgtcgctgagcttcgcgatgggatgggcgagtctgaccatgattttcgtggtgctgttcattcgttcggcgggaggcggggtgcagacgcccgctgtgcagtcgttcataccggatgttgttccctcgggcaaactattgcgcgtcaactcaatatacggcgtgattaattcggcgaatacgattgtggcacctgcggtggctgctgtgcttatcaacacagtgccgctgtggtcgattctgttagtcgatgtgaccacggccattatcggcgtcggctttgtggcgttgatcaaagcgccgaagaagagcgcggaacatgttgcgaggcgtatggctgaagcggagaatagcgggcaacccacactcgaacctatgtcggatgccaatgctgatcgttcgctgattgccagcgtccgtcgtgtgtttgctgacttgaaagatggtttcagctacacatggcgccgggcgaacctgcgcaacgtggtgctcggtggcgccttggtgtgcttcgtgtccgtggcgccgatgaaccttacgctgttgctcatgacccgcgaatatgagggcatcgatttgaatctcggattcatcaacctgaccaccgcctccgataaactcgccgccaacgagctgggatggagcatcggtatgctgctcggcggcgcgctgatgtctaccatcggtgccaagctcatccgcaacaacatgcgcgtggtcgccttcggcatcgctctggtgggcgtctccgtcgttggtcttggcgtggttcacaatctgctggcgtatttgctgattgatgtggtgaacggtttggcttcggccatctgcacgggcccgatgcgcaccatcatccagaccgaggccgatgagaggatggtgggccgtgtattcggccttgacaccaccctgagcgcgctcggaatgccgctcggcatgttgatcttcgcgccactggccgacgtgatcccgatttcgctggtgttcatcatcggcggtgttctgaccctgcccatcggcatctatctgttcggccaggcgcgccgtaacgtcagtgcgcaggtgacgagaacagcggcctgacaggcacctgacggccacctgccagacgtaaagtcaactaccagatttgcgcatacagatcgtaagacacatacttcggcagatcgtagacggtaatcgagaatggcgtggatcggccattgcccggccaatccacgaatgcgatatctccatagatgattgcgttctgtgcgttacgcagtactagggaaatcttgatttgctgtccatcagatggcttgaatccatctgccacggcgcggacctcgccattgaacgtcgtgccgccgtccctgttgtctattttggatattccactgatggggaaggcggcggttccctgagccttggcgacgttgtatgtatccggattgagcacagtaaaatcaaccgtttctggggcggtgccttcgcctgcttgaccggcgtcatatacagtctgattcgggaatgccatattcagtgcttgcgtctgcgagaacacgatggaaccgtctttggcccgccccgtaatggtaatctgcggatactgcacctgctgggtcttactggtgttgcgcagggcgaaagcgtagtggacatacccttgctggtccgccgaccagccggattccactattttcagaggattgtcggtgacggtgtcttgattgtctccatcagcgccgtcagtgccgcctactccgcccgtgccattggcattgtcggttcctgacccgttcgaggagtgcccgccatcggccttatcggttgattggctgctggattgtgtcgaggaatcgggtgatgttgccgacccgataatgccaagttggcctgccaacacaatgcctcccgcaatggcggcgattatcagtgccgctccggcaatggaccacagcacgatggcgcgtttgctcaagtgcagacgccggaatagtcgagacgccgacgcgctgccgttcgttgttctcgttgatggcggatttgccgatgatgcgttcggtatgggcggattggactgggagaacagcgcctggtgaaactcttggacgctctgtggccgtttgctgggctcgaatgcgcacgcatagccgatgacggcgcgtagtcgagccggtactgcggcatcatcggcaagtcgctgctcgtagtcgctggcatcgggatatacgccggtcagcatgaatccgagtagccggcccagcgagaatacgtcggaacgcgcgtcggttttggcaaagccatattgctcaggcgaggcgaatccgtaggtgccaagcgccgtggtatcccgtgaacggttgcttgcctctgaccggatgcgcgcgatgccgaaatcgatgagatgcgcgccatcctgggccacgatgacgttggccggcgtgatgtcgcggtggataacgccgtgctggtgaagctcctgcacggcttcgcaaatttggtcgataagctgcacggccacattcggtgcaagccgcccgttttcctccgcaatttgcgcaagcgtgctgcccggcacgtaatcgtagacgatgacgaaccggtcgggcagctcgtacgtcgcttccacacgcggcagacgattactctggcaggcgctgagcgccgcccacacattgcgttgcgctaggggagagggaatcttcttgcgtacgaacgggccgttgccgtcaatgctcaccagttcggtgacgccggaaggtccgcgagcgagcgtacgctcgacatggtacgcatcgtcgatgctcatcgcatgcatcgcctgcttatcgtccatgtctctccttgacgccctcttacttgcgtctcactggtgagtgttgttgggccgaatgtcgtcaatcggccggtagcaacgtcgcctctcccatacgatacaactcgtcgtccgtggcaatgcggtcgaatccattgcgtatacaccagatgataatcgcgtcgcgtcgctgtttgcaccacagttcggaaacgcctgcaagacgaagtagccgttgggtttcacgtaatgtgcacttgagaccaaaagccagcataatggcgtgatctcggccggggcggcttttgccggagaaaatgtcataaaccactgtggcgttgaggccggatgcccgcaccacgtcggctcgtctcaggtcatgggcttccatacggtcgaacagatagtcggtcagcgtgcgtgcgctgacgagtccctcatcgagatactgctcaatgctggcgctggcgagcagccgatccaacagttcctcggtcaaatgttcttcggggatgtctgccattgcccatgctccttgtcgctgtgttgcgggtgctgtgctgcgccatcgtacgcggttgctcgattcccagcgtacaggacgccgacttttcggaaacacgccgaaaaattcagttgtcagctgatgtatggcccgcgcgtgtcgccgacaatggtcgatgccatccgtgtaggtgcggtggcggaaaggatgttcatgcgcggtatcaagcatcgacaataaagctaacatgcatacaaaatgctaatttgcgtacataataacaacgccatacactggtttcgatgtatcgcagagcaaagcgagcaataagaagggacgcaatgatgagcgaacgataccggcttgccatggcagtcggattgaccgtaacggttgccgggcttgcctcttctgtgctggtaatgctgctgcttaaggaaagaagggcatcatgacaacgccatttgatcaacaacctcagccggttccaccgtccgaaggcacgaatgacgcaccggaagatcgcgcgaatgcgcctaccgtgccgaatactgtaccggctggccaaccgaacgtagcgtctgatggtgctaccaccactccgatggctccggctacggcatcgcagcggcccgccggcgcgccatttgatcgtgtatatgcggtcagtccgcaacagctgttccaagttattcacgaccagctgactactggcgccacgtttaccttggataacgaaaacacccagaccggagcgttttccttccactcctatgatggggtgaactgcacgctaaccgtagtcccgcagggtgcggcaggggccgccattcgtctggaggcgactggaaacgaaagcgccaagcgcgttgatgagttcctcgccgctctggacaagcgtattggtgtggctcctgcacccgccacacatggtgccggtgctgccactggttttgctggtgccgctgcgcctgccgtgcttgctccgaatgcacaaggggtgaagaagacttccaagctggctgtgttcgccattatttggggagtgttgttcgtactcgcccaatttgtggatgtttctggccgatcctggggcggactgctgttcgccacggtgattccggcactgctctcaggcttcgccgtatacgtgacccgcccgagtggcaaggtgcaaggccgagtgctggcctgggtggcagtcggtatcaccgttgtgggtctggtaatcggtggcgtgttcgtaattcgtgacgatgcgaaggccaaggctgatcgggcggaattggaagcatcgctcgccaccaagtgcgaagcatattcatggccggagtcggatatcgcggcgctgctgccgcagccgaaatccacaaagggtgaaattaaaagcgagtcttcggactatttctccatcgaggtgtgcggtaccgacgccaagcagtatgccgactacgtcaagtccgtgcaagacaacggtttcaccgtggactatagcaagtccgctgacagtttcaatgccaagaacgccgatggatacagtgtgagcgtttctcgtaacactgacgacgagaccatcatgtccatcactatccaggttccggaaaagaaggaagatacgtctacggacggcgacgccgcgaaacaggatgataagagcactggtacgggcactgattccagcgatgccaacaagcagagcgaccagtcttcggatcagaaggcgcagcagaacaccaatgacagtgctgacttcaaggccacgatggacagctacgaggcctttatcgatgagtatgttgccttcatgaacaaatatcagaaatccgacaacgtggtcagcatggctaccgactatgccagcatgatgaagcgttactctgagttctcccagaaggtagacgccattgacgaaaactccctcagcagtgaggattcggcctactacaccgaggtcatgactcgatgcatgcagaagctcgcatcggtgggccagtgatcagactggcgtatcgaggtaacggttttccaagaaaggaacgatgacgatacatgggtatacgcggcagacagtacacgccaatggatgagccggtcttcaacaaggccatccccggaacggaggctctggccggggcgctgaaggacacttttggcgcattccgtagtgggcttgggattaccgaacccgtggtttcggtgaattgcgaaggttgtggcgctccgctttccggtcatcgcaaagaagtcgttcgatgcgaatactgcgatcgcgaaacgcagctataaccaacatgccagcataacggccggtcttgcgattgcatagtcgcaagatcggccatatgcatgagatatcgaggaaaaaacagatggcagttattaaggcgttcgccggcgcgctcggcggtacattcgcggacctgtggcgtgatatcatcaccgctggtccgttcacggaacacaccgtcgttgtgccgggcattccccgcggaagcaacaacgatcgcggttcgaatgaatacggttccgagggaataatcaccaatggttcgcgtatctatgtgccagagaatactgcggcgttcattttctctgaaacaggtatcgaaaacgtcatcaccgagtcgggcggttatgaatatcgcaacggggaacagagcgtgctcgccggagacggcatcggatcgttcttcaaccaggtcgccgatcgattcaccttcggaggtcagcctggccgcaccaaatatgtggccttcgtcaacctgcgtgagattcgtggcatcaaattcggcacttctgcgccgctggtgtataacgaccggttctatggcgtcgatttggaaattcgcgcacgcggatccatgtcgctaaaggtcactgatccagttcgattcgttcgtaactttgtgcctgccacttccgtgtcgtattcattcgatgatgaagggccacgtaggcagattctgtccgaattcgtacagtcgtttattgtggccatcaattcgttgtccaatgaatatcgtatttcgcaattgcccggcaaggcgaatgacatcgcagcatgcgtgcgtggcgatcgagccaatgccggtacatggaatgatcgttttggctttgaagtgtccagcgtgggcatcgaaagcatcgagttcaccgagcaatcacgtcagctcgtgcagcagttcgcctcgaataagatgaatgttgccgcatacgagggcgtttcccaacaagctggcaatatggctgcccagcagcgcattgcgcaaggtattcaagacaacggctttggcgatggcggcatgttgcttggtatgaatatggcgcaagccatcaatcctatgactgccgccccggttcaagcgccggcacctgcgccggcaccgaaagccgctgctcccgcctctcacacggcatccatgtctgtggaagaacaagtcgaggcgatgaagaaattgaaggaattggttgatatcggcattctctcccaagaagaatttgatgcaaaaaagcacgaaattctcggcctataaacggtgcattcatgcaactcgaaacagctgataatgagggaaacgctggtgcgacacggacaaaatggtgctcagggcttcgaactgggttgttcaatccgtttcgatatttcggcgactcagcgcttgttcgggccgccgtccgggaacatcaagtaggtgatgatgccggcggcggttccactggccaatgcgccggtgatgacggcgagagcctgcatcgccgtgctgagcgtgggcttgcccgttgcggcagtctttgaagccttcaatgtggcggcactgggcttgcgtttctcggtggcggcgttgtcggcagcgttgccacagcctgtattgactggggcattgtcggcaacggcctcgccgtcctgctcttgagcgcgccgttcgcgaatgcgttgctcaatgggatcgtcgaccaaagtcttgatgatgcgtgccagatcgcggtcttcacgacgtgcgatttcggcgctgaacaccgtacgtaaagcgagatactgcagtttggtcatcgggcttttgccggtctccaagttagacaccgtctgtcgcgcgactcccagctcgtcggccagttgctgagtcgtccatccggctaccttgcgaatcggacccaggttctcctgaaacttatcaatccaccattgttcgatttcagacgccgccattacgcacctccttccacgctgtcaccagtgtacgttacctgtaccgaaatcaatccaaaaaacagtgttcatgtgaaattcactgcgtatttgcgctttcgccggcttaccgagattagccttagacaaggaataacagagtagaagcagaaggtatgcgcgtattcgatttcgacggaaccatctatgatggcgaaagcctgttcgacttgtacctgtattccgcccgccacgacccgaaagtgttccgctatatcgcccccgtgctgcggtacgcggtcaaatacaagcttggccgggccacgcttgaacagatggaatacggcgtgggcaagatgaccgaaggctatctcacggaactgagccgatccaaacgggtggcgagcgtcgaacagctcgtggacgatttctgggaccgatattacgcacgtatcaagccttggtaccagcctgagtcggacgatgtgatcctcaccgcatccttcgatctgacggtgggggaggcctgccgcagactcggcgtgaggaatctcgtggccagcgaggtggatgtggggacgatgaaggtcacgtacctcaacttcagcaccaacaaggccaaacggttccgcgaactgtacggtccggacgtcgtcatcgacgagttctacaccgactccaaattcgatcagccgatgatcgacatggcccggcacgcgttcatggtcaaggggaacaccatcacgcaagtcaagtaggaaacaacagaaaacaacacaacgtaaccaataacgaaaggggaacatatatgagcatgccgctcgatctatacgtaatccggcatggcgaatccgaagcgaacgtcatcgtccaggcgggcgagcagggcgacaattccctgtacacgcaggacaacgtcactgtgcccgatcgctcctggagactcaccgccaccgggcgcaagcaggccgactgcatcggtcgctggctggtcagccagcagcagctgttcgaccgctacatggtctcgccatacgtgcgcacccgcgaaaccgcagccaccatggccctgcccaaggccaaatgggaggagaaccgtgtgctgcgtgaacgttcttggggcgagatcaacaccatcaccaaggacgaattcaaaaacaactacgcgcgcaactggaacttcaagaacaccgatccgctgtactggcgtccgccggcaggcgagtcgattgccgatgtggccgaggaccgtgtgcacaacatcctgacctcgctgagccgcaaatccgattcggaatccgtggtcatggtcacccacggcgacttcatgctcgccctgatgctcaccatcgaggatctggccgacgaggaattcctgcatcgcgccgactcggacgactggaagatcaccaactgcacctgcctgcactatacacgccgcgacccggaaaccggccgcacctccaagcgtgtgcgctgggagcagaccgcccggcccgtgctcgacgagacgaccggccgctgggaggtcaaggtggagccgtggcgcgaattcaagcgcccgtatctctccaatggcgatttggtggatgtggtgcaggccgtcgatccacacctgctggagtattacggcaaatagcctttcccggaagagagacttcacaaaatcttcgtgagctagaatggtgcgtggtgcggctggttgtgaatgccgtgccccaagcgagagcgaggagagtagtaatgtccaatatcttccaatggcaattgcatggcgacggcaagacgctggcgcccggcgaggtagtcgagcccgatgaacgtctgacttgggtgcgcaccgccggtatcggcgcacagcacgtcatcgccatgttcggtgccaccttcctggtgccgattctgacgggcttcgacccgtccaccaccctgttcttcacggctatgtccaccgcactgttcctgctgatcaacaggaacgtgctgccgagctatttgggctcgtccttcggcttcattgcaccgatcaccgcggtcaccaccgccaacaagggcattgcggtcgccagcttcggcatcatggtcaccggtattctgctggccctggttggcgtgctcgtgcattacgccggctccaaatggatcgacatcatcatgccgcccgtggtcaacggcgcgatcgtggccatcatcggcttcaatctggcaccttccgtgtggaccaacttccaagccgcgcccgacaccgcactggttaccctgttggccgtgctgctcgtggctgtgctgttcaagggtctgctgggccgcctcaacattttggtcggcgtgatcatcggctatgtatatgcctgcatccgtggtcaggtcgacttctccgccatcggcgacgccgcatggatcggcttcccgaagttccacctgccgcaggccgatttctccatccttcccatgttcatccctgttgtgcttgtgcttgtggctgagaacgtcggccatgtcaagtccgtggcccaaatgaccggccgcgactacgacaatcagatcggcaccgccctcatggccgacggcctgggcaccacgctcgccggcttcggcggcggctccggcaccaccacctacggcgagaacatcggtgtgatggccgccaccaaggtgtactccaccgccgcctactggtgcgccgccgcctttgccctgatcctgagcctgtgcccgaagttcggtgccgtgatcaacacgatccccgccggcgtgctcggtggcgtgaccacgctgctgtatggcatgatcggcatgatcggtatccgcatctgggtggagaacaaggtcaacttcgacaagccgctgaatatcatggtggcagccatcaccatgatcattgccatcggccaattcgcgttcactgttggtggcatttccttcaacggcattgccattggcacgatcgtgattcttgtggcctaccacggcctgaaggccattggcaaggcaaccggcactattgccaaagacgatccggatattttgtagtgtgttttagggctactgggctgtatcttggctcagcccttttgcacaatggcccctaccttcacgggtgggggccatttgcgtgttccatggagcggtgctcgccttacgtggtggtaaaacccatggggcggcaaatatcccatggggtggtaaaaccctcatggggcggtaggtgaaaatggctttattctgcggtttcacaatttcttcaaaccgccccatgggcaagttgccgccccatgggcgagttaccgccccatggggtcataagtaaagagtgggatgacagtgtggcgagcaccaagcaaagtagggggcttacgctaagctcggaaagcttgcgtaatttgcgtaacctttgacatgaaaggccactgtgccccgtaataatttcgatgatcgtgacgattccgctgatttccagatgaacgacagcgcggaatcccgcccccttacctttggcgaacttggcgtacccggaccgctggtgcgcgtgcttgcggcagatgacaagaagaccgcattccccattcaggccgacaccctgcccgattcactggccggccgcgacattctcggccgaggtcgcaccggctccggcaaaaccctcgcattctccattccgctggtcacccgcctcggttcctacgattcgttcggcgaaatcgcgatggaggagttccgcaaggaaatcaagcgccgcaagaaggccagcctggaagagcgccgcgccgacgacttcctaccgcacccgcgcggcctggtgctggcccccacccgcgagctcgcgaaccagatcaacgacgtgctgatgccgctggcccacacgttcggcatgaacaccaccacggtgtacggcggcgtcaagtacatccaccagatccgcgatctgaaggccggcgccgatatcgtggtcgcctgcccgggccgccttgaggacctgctgcgccagcaggcgctcacgctctcgtccgtcgaagtcgtggtcatcgatgaggccgacgaaatggccgatatgggcttcctgccaccggtcaagcgactgcttgagcagatttcgcccgacgcccagcacatgctgttctccgccacgctcgatcacggcgtggatgaagtggtgaacaccttcctgcacgatcccaaggtgcacgaggtcgattcggccaccgccgaacccgacctgatgacccaccacgtgttcgaaaccacgcgcggcgacaagcacgaactcgtgcgcatgctcgcctcgggcgaaggccgccgcatcctgttcacccgcaccaagttccaggccaagaagctcgccaagaacctgacgcagaacggcattccggccgccgagctgcacggcaacctgaaccagaaccagcgcgatcgcaacctcgctgcgttcgattccggcgatgtgcgtgtcatggtggccaccgacgtggccgcccgtggcatagacgtcggcggcgtggagctcgtggtgcaggtcgagccgccggccgacccgaagtcctttgtgcaccgctccggtcgtaccgcccgcgccggcaaggcgggcgacgtggtcaccctcgtgctgcccgagcagcgccgcgagacgcgccgcttgctgaaccaggccggcatcaagaccaagatgatcgaagtgacccacgattcgcccgaagtgcttgagcttgtgggcgaccgcgccgagcgcgtggatggttggagcctcgacaagtcgcagcccgtgggcaacccgcgcaaaggcaagaacaggggcgccaagaacgcggcgggcgacgagtccggccgcggcggcaagcgcaagcacaatcgcaatcgcaaccgtgacgagcagaacgttgccgagaccgagttccagcacgagaacgcaggcggcgagtttgttgccgaaggcgagccgcagcgcaagcacggcgacaaggccagcaagaaggccgtgaagaagaaccgcaaccgtgcggaacgccgtgcaggcatgagcaaccccgaggccgagcgccgcgactatctgttcgagcatggcgatgaccgccgcgaggagcgccgcaagggcgaccgtcgcgacggatacggcaagaaccgtcgcaatgatcggtacggcaagggcgacaagttcgataagcgcgacagggccggatacggtcgcaacgatgatttcggcagccgcaggcacaatgcgggccgtgatttcgaacggtccgattcccgcgatttcgagcgtccgcgcaagcctcgccgcaatgaacgcagccacgaggattacggcttctcctatgacgagcgctcccatgacggccgcagacagtccatgcgcaacacccgtcagggcgaaggcggcaagcgcatccatcgcaagaacgagaaccgcatcgtacgcgacgagcgttcagaaggtgccaagcgtcacgaacgccgcatgatcgccaaatacggcaacacggaaggcccgaaccgccgtcattccaagaagaatcgccacaatgcgccattccgtatgaagtctggacgccgttagtccgacagcgcgtatgaatcaggcccgacgacctttgatggtcgtcgggcctgattgtgttataggccggtgtttgcgatgcggatgcctgttcgcctgcctagcggccatgacgattgcacttatcgccgcagtcgttgtgatcgtggccatgccgaaacggcggtaatggcctgtacgcaccctagaataacggatatgacgcaatcgcagccccgatccaaacgcacgcccacccttgaaatccacgggagaatccttgacgcggcaaggcggatcgtggaacgggacggtgtggatggtctgaccatccgtgcgctgtccgcacaggccgatgtgtcgcccaccagcatctaccagcacatcggcggcaagcaggcggtgtgcgatgcgctcatcgacacatacttcaccgatctgcgcgaacagctcatcgccattgacgaatccgaccccgtgctgcgcctgcgcagggcgggcataatctaccgtgaacacgcgctggacgcccccggcatttacgcgctggtctggatggggcaggcgtcggactcggcccagcactgcctggacgccatcacgcagatcattcgatacggccaggcagcatctgtattccgcggtgatgacccccatctaatcgcatcctccatctgggtgtccatacacgggttcatccaattcgaactgcgttccgcacaaccccgcacacgcggccgcgagcgggtcgaccggtcgtacggttacctgctcgacctgctgatccgaggcattcagaggtgaatgagttagctccctctgatgagggagctcagtattgatacgctgtactgccatcggcgttgcggatggtgaaagtgggggattgctcgatgttgaggtccacggtcagggaatgctgggcgtcggcgctcgtcgaacgatagacgaagtgcttgttttccagcttcacggcctcggtacgcgcatccagcagccatgggttgcgacggcgcagcgcgatcagcgcctgatgcagccggtatgtcggctctcccagcgtggacagttcggcaggggagtcggggaacttcggacgtacgtcgtcatcgccgccgaaacgctcctgcttgacgcccacatagccctgttcgtcgccgtaatagatgcttggtacgccgccgaccgtcatgagcaccgccaatgccaacgccgccttggccgggccaatctgcgatgcgatacgcgtcacgtcatggttgccgatgaacgtctgcggcacgaaggaatccaggaacgcgttgtgccgcttcaagttccaatccagctcgaagaagttctccgtctccagcgcatgctggatcgacttccatagctcgtattgcgtgatcgaatccatcgtggattcctcgatgatgcgcgggtaatcgccatggatcacctcgccgaaaatccacgaatacgggtgtgcggctttgacttgcggcaacacgcgcgcccagaacgggctcggcacggcatacgcggcgtcgaggcgccagccggcggctccgcgatccagccaatggctcatcacatgggccacatagtcaacggtctcgtcagccgaatggtccagcgccaccagatccccgtgcccctcgaacacatccaaagcgggttcgccattatcaccgacatgcgcgcggaccagaccatgccacgggttgtcggccggattcaagcgtccggcggtctcgtcaagcgccgtctgaacggccggatgattgcggctcacatgattgaacacgccatccagcatcacctgcaatcccatgtcccggcaggccgcgacaagctgatcgaacgcggcatccccgcccaatcgcacatcgatatgcatatggtcgagcgtgtcgtatccatgcgtcgccgactcgaacaccggacccagcagcaggccggacgcgcctagatcgcgcacgtactccagccagggaattatcgcgtcaaggccgcggccatggaactggcgcgggccggcgggcctgatatcggcaccgcagaagcccagcggatacacgtgccagaacaccccgtacttcacccaatcgggcattgtgcggctcgaatccgtgcttacaaccactgtgcacctcctgattgataccgtgtccattttcgcacatcgcggtgcgaatcccgggtaatcggcatgaaacgcagtccgtgaacatgtggccaagctcacatattgggacattttcctgaggcgctacatgccgtggctacgcttccaaccagtgccataagcagacgagagataccccaaaagggtcgcaatgaagagaacctttcccgcaaaggttattgaagaggaacagagggttattatgaccaccgccgcagcccaggccccggcacctggcaagttggaattcaaggacgattacacgccggacgaagccgaacgtgtgattcgcaattcgaagggactgcccgtaggcgtgcgtcccaaaatggtatggacatggaagaaggccctgctgtgggccgccatcgccatcgtatgtgcctgcggatgggcgattctggccgtctcgcgcggtgagcagatctccgccatctggttcctggtcgtggcgctgagctcctacgccatcgcctaccgcttctatgcctattacatccagatcaagatcatgcgcaccgacgacgcgaacgccaccccggccgagcgcgtgcatgacggcgcgaacttcgaacgcgccgaccgccgcgtgctcttcggccagcactttgccggcatctccggcgccggaccgctcgtcggcccgatcctggccgcgcagatgggctacctgccctccactctgtggatcatcctcggcgtgattttcgccggcgccgtgcaggacatgctggtgctgtggatctccgccaagcgccgcggtcgctctctgggccagatggccactgatgaaatgggtaagttcggcggtatgatcctatccatcttcctcgtggtgatgaccgccatcgccatggcatttctggcgctcgtggccatcaaggccatggccgcctcgccgtgggccgtgttctccatcggtatgaccatcccgatcgccctgatcatgggctgctaccagcgtttcctgcgccccggccgtgtcattgagaccacgctgctcggtttcgtgctgctcgtgctcgacatcgtcgccggcggatggatcgcctctatcccggccgtggccgccgtgttcacactggacgccaagcagctcgtcatcgccctggtgatctactcgttcgccgccgccgcgctgccgcactggctgctcgtcaccccgcgcgactacctgtccacgctgatgaagatcggcacgctcgtgctgctcgtcatcggcatcatcatcgccaacccgtccgtcaaggtgccgggtctgaccgaactggcctccacctccaccggcccgaccttctccggcaacctattcccgttcctgttcatcaccatcgcctgcggcgccctctccggcttccacggcgcggtgagctccggcctgaccccgaaggccgtggagaaggagaaccagattcgcatgatcggctacggttcgatgctcgtcgaatcgttcaccgccgtcatcgcgctgatcgccgcgatcaccatctcgcagggcgtgtacttctccaccaacatgtccgccgcacagatcaccgccgcatccggcgtgagcatctccgccacctccacgccgggcgaacaggccgatgccgccgtcaaggccgtggagtcgatgaaggtctccgacatcgaaggcaaccagatgcaggtcacctgggattccgtggacgagaacggcgcggccaagacctacgaaggcgccgcggcgcttgagcaggccgccgccgacatcggcgagacctccatcgtctcccgcaccggtggcgccaccacgttcgccatgggcatggccaacttcctcaagtcctacctgggcggccacgactcgatggccttctggtaccacttcgccatcatgttcgaagccctgttcatcctgaccaccgtggacaacggcacccgcgtggcccgctaccagatcggcgaaatgctcggcaacgtgcgcaagctcaagaagttcgccgacccgacctggaagcccggcaacatcatcaccacgctgatcgccaccgcgctgtggggcggactgctgtggatgggcgtgtccgacgcgaacggcggcatcaacgcgatggtgcctatcttcggcatctccaaccagctgctcgccgccgcctgcttcgtgctgatcaccgtgtgtgtggccaagatgggctactggaagcacctgtggataccggtggtaccgctcgtgtgggacatcgccgtgaccttcaccgccgacttccagaagatcttcgggccgctgagctacttcaccaccgcctccaagtatcaggcgcagatcgactccggcgagctgaccggcgaggcgctgaccaacgccaaggccgcgctgtccaacgcgtatctggacggcgtgctctccgtgttcttcctggtcatgatgggcgtcttcgtggtagtcggcatcgtggtcgtggcgcgcacgttcgccgctggcaagtacggtgccgaaacgacgtccgaggagccgttcgtggaatcccagtggttcgcgccctccagcctggtcgccaccgcgcttgagaagaaggtgcagcgcgaatacagcgccaagctgcatgagcttgtgcggaacgggcaggttgcagcgtagtgcgtcattggctccccttttttcaaggggagccaataatcagcgaaaggagacaaaatgctcggcaaactcgttgccgtatggcacggcatcgtctggtatctgcgtgagatcagcggcgaggcccgctacgaccattatcttgagcatttcgcggccgagcatcccggcgaaacaccgatgagcgaggtcgaattcattcgcgcccgcgaggaatacgaccgtctccaccccaataccagttgttgctgctgacaggccgcaatagcataacaacaccataaaacccgcgcgccatgggaactacgtagccattcttccgttacaatcagtgtgacggcttccgcccccgaagaagaaggtgttaattccccttggacgtctcactggcgcatttcctccaacaagtgctttccaacccggctctgaccgtcacaacgttgctgacgctgggagtcatcttcgtcaacggctggaccgacgcacccaacgccatcgccacctgcgtgaccacacgatgcatgcgcgtacgctccgccgtcatcatggcggccatcttcaacttcctcggcgtcttcatcatgacgcagctcaacgcctccgtggcctccaccatcagcaacatggtcgatttcggcggcgacacgaacgcggcgctcatcgccctatgcgcggcgctgttctccatcgtcgtatacagcgtgggcgcctcgctgctcggcatacccacctccgaaagccacagcctgatcgccggcctgtccggagcggccatcgccatccaaggcggcatcggcggcatcaacatgggagaatgggtcaaggtgctctacggtctggtcgcaagcctcctgttcggcttcgccgtcggctggttggtatgcaaggccgtgaccctgatttgcgctggcatggaccgccgccgcaccaacgggttcttcacctacgcgcagatcgtgggcgcggcggccatgagcttcatgcacggcgcgcaggacggccagaagttcatcggcgtgctgttcctcggcatggcgttctgcaatggccaacccagcgtgaccggtgtgatgattccgatctggctcatgattctgtgcagcaccatcatgggcgtgggcacgtccgtcggcggtgaacgcatcatcaaatccgtgggccaggacatggtgaaactcgagaaataccaaggcttctcggctgatctgtcaagcgcgctgtgcctgctcgtcatgaccgtgctcggcatccccgtctccaccacgcacaccaagaccagcgccatcatgggcgtgggcgcggtacgccgcctctccgccatcaacttcggcgtggtgcgcgacatgatgctcacctgggtgttcaccttccctggttgcggtctcatcagcttcgtaatggccaaactgttcatggtcgtgttctagaaaggaatccacccatcatggcgagacaaaaagacacgttctacttcgacggattccgccgcagcgcggactacgcatgccaggccgcgaagctgctgtccgaggtcatgcacgacttcaatccgggccagctgcgcgaacgcatggacagcatgcacgcgattgagaagtcagcggacgaggtgcgccacgacatgatggacgaactggtgaccgcgttcatcacgccgttcgaccgcgaggacatcgacgagctcggccacgtgctcgacgacgtgaccgacagcatcgaaggcgtgctcaaccgcatgtactacgacaacgtgaccgacatgcgcgacgacgcggtccagatgtcggatatggtggtgcgcgccacggaaagcatctgcgagctggtcaacgaactgccgcgattccggcattccaagacgttgcgcgaactggtgttcgccatcaacacgatcgaaacggacgccgaccacctgttcatcgagtcgatgcgcacgctgcacaccacctgcaccgatccgctgcaggtgttcgcctggcatgacgtctaccgtcacctcgaacagtgctccgacgactgcgagcgcgtggccaacaccatcgacagtatcgtcatgaaaaacagctgaggttggtttttcacaacctccctctgatgagccgagccgtgaagaaaacgccggaggcgtttttaggcgagggtgagtgacaacgagcgaataagaggtcagctgcaagctgtcctgaatcgcgttcgaggtggcatcgcgaagcgatgtcggagggagaggcctacttgaccaaaagccccctcacctatgggcgttgagccagaggatggcgagttgggtgcgattggtcaggccgagcttgtccagtatcgcgctgatgcgattgcggaccgtgccttcgctcaggaacagtctggcggcgatgtcgcggttatcgaggccctcggcgaccagcgcggtgatctcacgttcgcgctcgccaagcaggccctcgatggaatcggcggtatctctggaatcgtcggaatcggcaggatccggagttcgttcggtgagcttgccgagcacttccgcgccgagcaccacctgaccggccatcaccgcctgcagcgcgggcccgaccgccgccacatcctgtttgatgagatagcccttggcgccaagtcccatcgcctgcgcgatatacgactggtccgcaaacgtggtcaggaacagtatgcgcgcggccgggtccgtggccagaatctcgcgcgcggcatccaaaccgctggtgccgggcatctgaatatcgatcagcagcacgtccggtcggctcgccggtgtctcgaaataacggcgcacggcggcgtctccgtcatttgccatccatagcacctcggccgtgccggtggccgtcagaatcgtctccaacgactggcagacgatcggatcatcatccacgattgcgattctcatcaatccctcgattccatggtccaacgcttcttcggcacggatacgaacacacgccagccgtcctcatacggcccgcagaccgcggtgccgccaagggcgcgcacgcgcgattcgatatccgccaaacccatgccgcgcatcagctcatcggccgaaccacgcatatcggcaacgccgtcggcggcgagtcgcgagccgacgtgcgtggcgcgcatcgcacgcgggcgggcagcggccgtccgggacccatcggactcggacacggccggccccggatcctgaatgaccaactgccagaacgcggggaagtcacgcaacgtcacgctcgcctcgcgcgccgcgctgtgatgcaccacgttcgacaatgcctcgcgaatcacggtcgcgaaacagcgcgagaccggcgcaggcgccttggcgatatcgttggccagcgtcacggcgaaaccgggggagatgccgtcgaacgacgtgacggcatcatcgatctgcgcggcgaaatcagtgccatcatcctcaagatcatgcaccgaacggcgcaccatcgtcatcgcatcatccaacgtcgcacccaacgtggcgaacccttgcgcagcgaccgtatcgttcgtcgccttggccaccgttttgccggcctgcgcctgcatgatcgcgcgggtcagcagatggcccacattgtcgtggatctcccgggcgatacgcgtgcgctcgccgagggtcgccatgcgaatcgactgggcgcgttcctcatcgatgtcggcgatgcgcgaacgagtggcccgcgaggattcgcgcgccctgtcctgcgcgtgcagcaacgcgcgccgcgcctcgtccgaggaggcgcgggcccggcccagaacgaatccaagcagggcgaccagcgtcatcaccagcgtctggagacggtcggtgccacgggcgaaccagagcgcgatcagcggcaacacccatatccagcgcgcggcggccgaaagccacggggccgaacgcattgcatcggcaagggaacggcgagaggccgcggtccgcgagacactgggggagcggccacttgccgcagtccgtgccccagcccgggctccggtcgaggcgagggccggcagccgtgcagtatcgtaggcgatgagcggcatgaacgcgcaccatgaaggcaccgccacggcgatgacgagatacgccgtacacaagacccaagaccattgcgcgggacgcagccattccaccaatccggcgacggaaacggccaacagcaggccggcgatgaacacgccatcggaccgtagcccgacaaccaggcccaacacgagtagcaagcccatctcggccaacacgcgcatggcacctccccggctcgacgctcttccaccaccagtctagcggtgtgcggaacacgacgaacttgacgggcgtgcggaattacccgcatgacggtccaagacaacgggcctacacttcccgaatagatgaggcacaagcgtcggatgtcgtcgacacaaccgtaaagggatgataccgatgattacgcaaagccacagggcgtccaactattcgatggacgagatcagcctgatgccggtcgataaggtgtacaaggccatgcagaccgacgccgaaggactgtaatgacaaatgtcacgcctgtacggccaagtcgtgacgtttgcctgtggcggcgtccggccccttcttgggatgatggaatcgccaaggaagggagtgactatgacaaccgacaacagagcttccgaacacgactcgacaaccaacccggctctggccgtgcacgtcagccaactggtcaaacgctacggcgacatggtggcgctcgactattttgaccttgacgtgaaccagggcgagattttcgggctgcttggaccgaacgggtccggcaaaaccaccgcgatcaactgcatcctcgcgctgctcacctacgattcgggcacgattcgcgtgttcggccagccgatgacgccgacctcctacgcgctgaaacgtcgtatcggcatcgtgccgcagaacgtggccgtgttcaacgaactgaccgtcaccgaaaacatcgactacttctgctcgctgtacgtgccgaagaaaaccgaccgcgcgccgctggtcgaggagtccatcgaattcgtcggactccaggacttccgcaagttccggcccggcaaactgtccggcggtctgctgcgacgcctgaacatcgcctgcggcatcgcgcacaagcctaacctgatcttcttcgacgaacccacggtcgccgtcgacccgcaaagccgcaattcgattctggaaggcatccagcggctcaaccaggccggcgccacggtgatctacaccagccactacatggaggaggtcgaacagatctgcgaccgcatcctcatcatggaccacggccggcacctggcgctcggaaccgccgacgagctcaagaacatgatcgacacgggcgagcgcatcaccatcgaaacgctcgatctggcggattcggcgatggccgaggtccgtgcgctgccgtgcgtgatcgaagccacctacgacggcaaggaactcgacgtgcgatgccgtcgcggcgaacacaacctgaccgacgtgctcgacgcggtgaaacgctccggcgccaacatcggccacctgaccagtcgcccgcccaccctcaacgacgtgttcctcgaactcaccggcaaagcactgagggactgaccatgctcccctcagtcggcaagcaaataacttggctcccctctccgaggggagctgtcaccaaaggtgactgaggggagttcctgagtaaggagacatcatgtggaccacatttctggtcgcattgaaagcgaacttgcgtaaccggtcggcgttgttctggatgaccgtgttcccgattgtgctggcgaccatgttcaacggactgttcggcgggctggccgaagcatacgaactcaagccggtgccgatggccgtcatcgaagacacccgttggcagcaggcggacggtgcccgcaccttcgtagacgcgctggccggggaaacggaatcggcctcagacgacacgacctacgccgaaatcgaccaaaagctgctgaccatcaccacagtcgacaccgtgaaggaggccgaacaacggctcgccgacggcactgccaacggctatctgaccgccgacaataacggccgattggcgatgaccgtgagccgggaaaccgccgtcacagccaaggactccacgcaaaacagcggactggacattagcctcgcggccctgcgcagcgtcatcgacctgtacaaccgcaccgacgccgttacccggcagaccatcgccgacaatccacaggccgcgctcagccggaacttctggaacagcgtcgggcagaacgtcgacatgacccatgagacgacgctcacgcatttccagcctgacgagatcgcccgatactattacgcgctgctggccatgtcctgcatgatggccatgggatactccatcagcacagtcgccgccgcacaggcgaacctgtccgcgctgggcatacggcggaccgtagcgccgctgagccgggccaaacagctcgtcgcgggcttcctctcctgctggctgtgctcgtcggtcgccctgtccatcgcattggcctatatccggctcgcctgcaacgtctcgctcggcggacgcgaaccggcggcgatccttgcggtcatcatcgcctcgttcatgaccagctcagcaggcaccctgctcggtgcggtgccgaagctctcgtacaacacgaaatacgggctgtcgaccggcatctcctgcacgctgtcgctgttcaccggactgtacggcgggtttgccatgcagatcagcgactggatagcccgcaacgcgcccatactcggcaccatcaaccccgcacagcaggtgacgaacctgttctacgacatcctgtactacgacagctaccggccgttcatcaccacctgcatcattctgctggcgatgagcgcggtattcctcttggccggcatcgcaatgctgaggaggcaacgttatgaacacctgtaaagccacgctgcgcgtgctgttcgcgcaccgggtctacctgatgatctacctcgtattcataggcatcctgatgatgtccatcagctgggcgatgctgacctccgcatccggctccatgtccgcggtgttcgaatcgaccaagacgcgcgtcgccatcatcgaccgcgactccgaccggggtgatatcgccacgtcgatgcgcgcctacctgcgcgattccagcgaactggtggacctcgacgacaccagcgaaacgctgcaacaggccgtcgcctcgaactgggtggacctgatcgtcatcattcccgacggattcgctgacgattatgtcgccgcggcggcggacggcgacaatccgccgaacgtggacacggttaccagctacgcatccggctccgggtcgatggcgcggatgaacgtcggcgggttcctctcgctcacccgcaccgcactgatcggcgcgcagacgagggtcgaccaggcggcgctcgccggcatgatgaacgctacaggaggggccgccggttttgatggcgcgagtctggaccaagacatgctggactcgctgccggaagggcaagtcgacaagccggatatcaaggatctgtcccaggccgccaaaatggccgccgaatcggccagcgatacagacgtgaaccatcagatcgccgtggtcgatacgccgaccgaggagtcggcaagcgctgcggatacggcggtcagcggattcggcggcaccatgaaaaccgcgctgtacccgctgtccctggcgatgaccatctgcggatcgatgatcctgggcgcgttcaccaccggcgaggtgcggcggcgtctcaccgcctcgccccgacgcatggtcctgatgggactccagcggttgctgacgttgggcggattcgcgctcgtcgtatgcgtcggctatttggtgctgtcaatcggtctgatgatggcggcggggctcgatccgttgcacctgagcgtcgggggagtgctgatgacgttcggcgcgacctgcgtgtacgcgctgatgaccgtcgcctgcggattcatgctcagcgagttcgggctctcggaagaggcggccaacgggttcgccaacatcttcggcctgctcatcatgttcacgtcgggtgtcgcattgccgattgacatgatgcccggcgtgatggtgaccatagccaagttcctgcccggctggtggtattgcaccgcgatcgacaacgcgctcggcttcggcacggcggcggaaaccggcataagcgtcgccggctggtccggctcgctgggattggtcgcactgttcggtgtgatgttcatctgcatcggcctggccgccggccgcttccgccgatcccgccccgccctggccgcgcccgccaccacgcagctggccgagtgagaaatcagcctttcaaccgataccgctgtgccgggtcgtcggcgaacttgactcgggcgacccgcccttccttcatcagctcgcgcataccggatgtggcggccagcggcgtcaactgcagttcgcgcatgatctccttgacgctcatggccgaatgccgctccagtacggtcataatcgccttgaccacgtcgcccggtgaactgttcgccatcgtgcgctgcttggtgatggtcatcgtgaacgtgttgatgtcgttgcgcgtggtcgccggctcgatgccggcctcgcgcaacgcggcggcgatgcgctggtagccgtcgccgccttccgggttcacaaacccgccgcccggatacggcgtggactccagcagcgtgaacaggaactggtttcgggtggagacgaacggcgcgcccgtcaccggatgagggctcgccagcacatcatgtgtcaccatgccgtacaggccacccggattggtgatctcgatgcgatcggtgaacacgctgatatgcacctgcgtgccgcgcgcatcgggcgaataatcacggtgggtgagcgcgttcgcaatcgcctcgcgcaacacgagcggcggatagtcgggcttcttcgcgccaatccaacgcatcaacgagtcgaccgcatcgtcgatcatcaccggaatcgaaccgaccaccgacttcgaggcgaccaatcgttcgtcaccccggaacacatcgtcccggctcgtccccggaaacacggcaatcgaaatgccgagccgcggatagaacttctgcggatagcggcccaacgccagcagtccggccaaggtggggcgcaggattccgccgacctccgactcgtcggaatcatcatggcgcaacacctgcagatccagcagcacatcgatgccgtctcggtcggcgaacacgcgcggatgctgttcgcgcacgcgtgccaacagtccggcaacaagctgcgggtcgaggtcatcggtcgtggcgtcgggcacgatatccagatcgtatgtgggctgcagatgctcctcgatgagccggtcgacctcataggaggtcatgcgccggtcgccgtcgccggtacggatgaacgagccgccgtgcggtccgagcgcggtggtgaagcagggcttgtcgcgcggcagcatctcgtcgatgcgcgcgaacaccagattcgcgccttcgaacgggcaggtgacgatcacgggccgcaccaccggcgtcatcttctcgcacgcctggctcagcgcctcctgcatggcgcgcgcgtcgaatccctcgaccggcgtgaacccgttcttttcggacaggcccaggataatccagccgccggagccattggagaacgcggacagcgtatcggtgatggtcgaggagatcttgcgcttgcattccttgacctcgcactgttgcgtatcgttgccgatcagacgcatgagttcgatcagctcagtcattttggcagtatagtcatcgaccatggcggcctccttgaaaccattgtgccccataatccgccgcccgctcgcctccagccccgccagttcaccccaattcatgcagaattcatgggccaaaccagacgaaacgaacgtcgatgtagggttcggttccgcgtgttcgccgatgatatcggccggtcgaggcgggcgggctatgttgggtggcgtgggaatcttgcgcgtgattgatgctacggctgtgtgcttcgctctgggtatatccggcccgatcagcgggactcagccaatgtgatgccgcccgcagccatctgcttgcgggccgcaacaccaagttcctcgctgaccggcacggtcagatcctcgaacacggtgacctcgaagccgagcttcttggcatcgagcgcggtgtccttgacacaatgcgattcggcgatgcccaccacatccacgcgactcacgccggcggccttcagcgcgttggccagcgtcttgccggcggattgctcggcctcgacctcctcgcgggtctggatacggtcggtattgtcctcgataccctcaaaaccggaatatgccgccgaatactggcccttcttgaaatgatgctcgatattcagcgccttgatcgccggatgcaattcggcgttcagcgtgccggccgcaccatgcttcggccacgtgtccacgaaatccggctccgccgaccagtgcgcgcccggctcgatatgccagtcctgcgtggttgcgatatacgcgtactcgctgcgatgcgcgttcacataatcggcaatccgctcggcgaccgcgttgccgcctgcgacacccagttcgccgctttcacagaacgtcggctgcacatccaccacaatcagtgccttggtcatcgtcattccccttattgccttggattcgttttgaatattgtctcgaactcgacgtgcgattgctctcatcatagccatgcgcggccctgtgggaaacgttcgggcttacactgcaagcagcaatcgaatacaagaaccaggggagggcgaccaagaccatgctggaccatctgacgttgcacgtgaaagacatcgaccgtagcatcacattctacaaacaggcgctcgcaccgctcggctatatcgtcaaggcgcatcatgagcctacgctcggattcggcgtggatgacggaaccctgcactccgatttctacgtgtcaccgattgaagggctggaggcggaggcttcgccggtcacgccggtcacacacatcgcgttcttggctgacagtcagcaagccgtgcaggcgttccatgcagccgcgctcgccgccggcggccgagacaacggcgctcccggtccgcgcccgtaccatcccggctattactccgcattcgtgctggacccggatggcaataacatcgaagccgtcgtggattgggctcattcgaacgagtaaaaacatatccgtatcgtgcctcaggcggcatcgacggcgtaggctccaaccagtcggatttgtggtcgcaacggcggtataggtcacatcacgcaagcgtgaaggtgatggtctgctcggcggtttcggtgccgatccatgtgccggctttgcggttccaatccatgccgtccgcgtgcagtgcgtcaatgccgtattgacgtgcatgcgtgaccagccagcctgccgtctgccagcaaagtcgagtgcggttgtcggcggacaggccgtccggcagcgtgatcgtcaacgttgtgctggccgtattggtcgcagcgccgttgttcgtgccggttttgccatttgggggcacaaccgagacattgacattcggcagtgtacctcctatggcggcaaccaacccgtccgcgtccgaggaggttgctggctccaacgcgcacgtgacgcccgccgaccgttcaccggtcagccccgaggcccaagcgcgtgccatcgcatcccatgcggcatatagttccgggtagcctgagcgctgcacctcctgcgcggcgtcctccaccggaatcgtctcccaatccggcacctgcagcagatgatcgtagaagatgtttgtcgcataggtcatgtcggacacctgctccgccgtgccccagccttggctgggccgctgttggaacaggccgagcgaatccaagtcgccgtagtccagattcgtcagcctcgactcctgcatggccgtggcgatggccaccgtcgccgcgtgatccggcagtccgcgcgtgacggcgatgttcgcaatcagcgccgcgttctgcgcctgatcaggcgtcaaggtgcggcgggctccgtcggacgacaccgccgcgcaatatgcttcctcggccgtgcgcgcggtctcgcgaggcgtgaatagccgtggcagcagcgtccatgccgcgatcagcgccgcaacaacaagtatgacggctgcaatcagcgcgcccgcgccatgggagcggcgtctgccgtaccgcacctgttgtcccattgcgcctccaatatttcggtgtcatggctgaccgtgaccggctggcctatgcagcatgcgggatttgccgtgttccggctcggccgtcatcatgacagcgtggcatatccacctgaacggcggctgcgtcatcacgcgactttgtgacaagtcttcacgcttcatgacatccgcgcaaatcagcccctcgaaaccgagaatggcggtcggaattgctccgacaccaagggagctgctgccgctattgtgtgaaaggcgatttgtaccgggttgaaggagaggaacacatggcgcaattgcagccgtactgcgcgattgagggcaatgatgatggattgcccgtcgtgttcgtgcatggcatgggtgtggaccatcgttcgctgatgatgctcgacaaggcgtttgacggcaatgattcaattcgccgtatatatctggatctgcccggtttcggccgtacgccggcattgcccgagcatgcctgcgggctgccggaaatggcggattggctgcaaacggccattgacggtcttgtcggtaaagcggctccattcgccatggtcggcaactcgatgggcggtgcgcttgtccgcgaagtattggcgcgcgaacctcgccgagtggccggtatggcattgatcgcgccggtcgtggacccgcagcatgccggccggcatgtggccgaacatgtggttgcacagcccaatcccaagctgacgcactccttgccgcaggaacaggtgttcgatttcattaccatgggcgtcaaccagtcattcgacgcgtggcgacgctaccaacggttcatcctgcccggcgtggcgttgtgcgaccgtgcggcatgcgaacgactggatcagcgctattggctggccgataatcccgaggaaatgctcggcacatatgcgggtccggtgctcatcgtcaccggcaagcaagaccagatcgtcggatacgaagatcagcaagccctgttgccgcactatcccaacgccaccttcgtgacgctggacaatgccggtcacaacgcgcacatcgaccaacccgaagccgtcatcacgctcgtgcgcgaatgggtggctcatatggcgttcgctccgttgagctgacggtctgctgacagtctgccgaagcctatatgtatacgagcgaccaatgccggttgacgcaatacgccttgcaaggtatatcgtttttcgatatagtcatatcgatgttcgcggtgtcgccaaaaaaaacgtcggcacctgaaaggaccgggctatgaaaaactacatgaaccgatgggtgttgctcgcgttgaaagccatcgtgattctggtctggctggcctgcctatggggccaactattcgccgtaccgggattgagcggcgcgctggccggcctctacccgagccagacgtcgatgcgctggccatatctcattatgggcgtgctgttcctgttctgcatcgaagcggcgttcgtggccgtatggaaactgttctccttgtccggctcgggcgcgaactcgagcaggtgatttgagatgacgattcgcatcaatctcgacgtcatgatggccaaacgcaagattggcgtcggcgagctcgccgaacaaattggcatcactcccgccaacgtgtccattctgaagaacggacgtgccaaagccgtccgcttcaccacgttggacgccatctgcaaggcactcgactgccaacccggagacatcctcgaatgggaagatgacgattgatcgacacgccaccggctcgaactcatggttcaacttgtagtctctcccaaaatcaatgatgccctatcatcctgcaagacgatagggcatcatcatgtgattatgcgcagctgatatgttgcgttgttatcactcggcgtccgcggccggtgcctccttgggcgcagagaggaagtgctcctcgctgggcagcacggtgttcaggatcacggccaccacgaacgccacggcgatgcagttcgaggcgaagatttgttggaacagtgccgggaactgcgtgaagatgtcgctcacctgggtgaagccgatgccgatggtcagcgaaagcgccgcaatcgtgatgttgcgctgcgtgaagcccgcctcggcaatcatctggaagcccgaaagaatgatgttgccgaacatcatgatcgtgcagccgccgagcaccgcctgcggcagcgagttgaacacctcggcgatggccggcacgaagctcgccagcaccagaatcagtccgccggagagaatcaccttgcggttgacgaccttggtcatggccaccaatccgatgttctgtgcgaacgaggtcagcggcagacagccgaacaggccggatacggtggagatcaggccgtcgccggcgatggcgcccgcggtctcgcgttcggtgggcgtacggttcaggcccaccttggtcagcgcggcggtgtcacccagcacctcgaccgaggagacgacgtagagcaggccgatggagatgatcgagccccagtcgaactcaggcttgaacggcatgaactgcggcacggacacgatggcgaggttctggaaaccggagaaatcgaccttgcccatgcagatagccgccacatagccgaccaccagaccgaacagcacggacagctgcttggccgtgcccttcatcaacagctggaacgccaggcaggcaaccaaagatataagcccgagcgtcaggttctgccaggaaccgaagtccttggctccgctgccgccgccgaagctcgtggcacccacgttgagcagcgagaagccgatcgacgtgaccacgatggcggagacgatgggcggcacgaaccgacgccaatacttggccgtcaaacccagcacaagttccagcagaccgccgaccattaccgcgccgaccaccgcgccatagcccttgtccgcgcagatcgccacggcggccgccacgtaggtgaaggagatgccggtgaccatcggaagtcgcgagccgatgagccacgcgccgtacagttgcaggcaagtgcccaggcccgcaaccagcaggccggactggatgatggtggccgattgggccggggtcatcttcgcggccgaggcgacgatgaagatcggggcgaggttcgccacgaacatggccatcacatgctgcaggccgaacggaatgcccttccagaaggatactggcgcgtccagcgaagacaacgcctcaaaggatacggaatgattggttttcttctctgacatgattctcttcttctctctgttgctcccgccggcgggagcagccaatgtgctcagtgcctaaatgtgatttcgccggtctcgggattcatggactcgacgatggccagcgaatccacatcgtagccttcagcgcgcagcgcgtcaccgccgccctggaagcccttctccacggcgatgccaatgccctcgaccgtggcaccggctgcttcgcacagatcgatcagaccgcgcaacgccttgccgttggccagaaaatcgtcaataagcagcacatggtcgccggcgttcagatacttcttggccacgatcaccgggaactccttctgcttggtgaaggaatagaccgtggtggtgtactggtcgccgtcaaggttgatggactgcgccttcttggcgaacaccaccggcacattgccgaaatgctgggccgccacacacgcaatgccgatgccggacgcctcgatggtcagaatcttggtgatgtgcttgccggcgaaatgagcggcccatgccgaacccatgcggtcgaacaggcgtacgtcgcactggtggttcagaaacgcgtccaccttgagcacattacccgccttcaccgttccctcgctttggattcgctcctcaagttcctgcattgaacctcccattgttgtatgtcagtgaatgatatggatactcgtaagtgtacgttgtcctgcgctgacccgtgcatgtggtaaacatgaatgtcgcgattcaaagggaggcaacagtgtacgacgagccggaagtcatcgcacgcagcgcacaggaactcgtgggcgacctgaacccgcagcaggcggaagccgtgcaataccgcggtcaggcgctgctgatcggagccggtgcaggctccggcaaaacccgcgtgctgacccgccgcatcgcctggatcttgagccagttcggcgcatggccgagccagattctagccatcaccttcaccaacaaggccgccgccgaaatgcgcgaaagactcggctcgctgatcggcccggtggcccagcgcatgtgggtctccaccttccactccgcctgcgtgcgcattctgaggcgcgacggcaagtccatcggactcaagtccggcttctccatctacgattccgccgactccgagcgactcgtcaaaatcatcgccaccgaattcaacctcgacatcaagcgctacactccacgctcgattctcggccatatctccgacctcaagaacaatctgaccggttggaaggaaaacctcgccgttcacgcgcccgacttcacgcccggccagcgcggctaccagttcggcacggtgggcgaccttgaagccatctacgcggtgatctacgccgaatacgagcatcgcttggccctggccaacgccgtcgacttcgacgatctgatcggccgcacggtcgagttgctgcgcactgacccggccgtcgccgagtactaccatcaccgcttccgttacattctggtcgacgagtatcaggacaccaaccacgcccagtacgtgctcgtgcgcgagctggccggcgtggacacgggggagaaggccatcccgggcgcgcctaacgccggcaagtccggccccgcctggatcaccgtggtgggcgattccgaccagtccatctacgcgttccgtggtgccgacatccgcaacattcaggacttcgagcaggacttcccgaacgccaagaccatcatgctcgaacagaactatcgttcgacgcagaccattctggatgcggccaacgcggtgatcagcaacaacgagggccgcaagcccaagaaactgtggaccgcgctcggcaagggcgagccgatcgtcggctacgcggcggacaacgcccagcaggaggcccagtgggtggccaccgaaatcgcgcgcctgcacgccgaagcgggcatcgcctactccgacatggcgatcatgtaccgcgccaacgcccaatcccgctcgctcgaagaggcgctgatcaacacgaatcagccgtatcagctcgtcggcggcaccaagttctacgaacgtcgcgaaatcaaggatgcgctggcctatttgcaggcgctcgtcaatccggacgacgatgtgaatctacgccgtattctcaacgtgcccaagcgtgggcttggcgaccgcgccgaaggcgtgctgctcgcctacgcgcgtgagcatggcaccagcttcttctacgcactcatgcacttggatgagatcgaggtgccgacacgcaccgccacctcgctacgagcattccgcgatctgatgggcgcgctctcgcagttcacgcgcgcgcacgactccaagcccagcgagatcgtggccgaagtattggagaagtcgggcttaagggccgaactcgagaaatccgtggacccgcaggacgcctcccgtctggagaacctctcccagctgcagtccactgccgccgaattcgaacagaacacgcctgacgccacgttgtccgcattcctggagaccaccgcgcttgtggccgactccgaccaactacccggcgaggcggaggactccggcaaggtgacgcttatgaccttgcacaccgccaagggcctcgaatacccggtggtgttcctgaccggcatggaacagggcaccttcccgcattcgcgttcgatggaagacaccactgaactgcaggaggaacgccgactcgcctatgtgggcatcacgcgcgccaagcagcgactgtatgtcacgcgcgccgccgtccgctcccagtggggccaggccgccgatatgatgcccagccagttcctcgacgagattccggattcgctgattgattggaaacgccgtgaagccggcgtggagcgtatgcgcgccagctgggagaccgatggattcgccgacgatttgggcggctgggatgatgacgattttggcggcgccgcgtttggcgggtcgtcgacgttcggctcgcgtggttcgtccggttcgggttcgtcctatgggtcgcggtcgcggtatgggtcgtcgtatggctcgggttccggctcttcgtcgtatggttcccgttcatcgtcgtatggttcccgctccggctcgtcctcctatggttcccgctcccgttcgggttcgtcctatggttcttcaggctccggttcgaggtcgtcctacgggtcgcgttcccgttccggttcttcgtccggttcatatggtggcacccgtggcggcaaagtcaccacgcgtcgtaccgcaccgaaatccgattcgaccggctctgccgtgcctagctcgaagctcaccaaggacaatggcctgaatatcgccgacttcgccgtgggcgacatgatcagccacgaccagtacggtctcggcaaggtcaccgacgcacaagacaagggccgcaattcggtaatcaccgtggacttcggctccgccggcgtcaaacgcctcatgctccgcgtagcgccgattgagaagttgtagataaattggcccctctgacgaggggctgagttatataccaaataaattcgcaaaaaacaagacttgtgttcttcatcacagtgtgggcataatgcggaggttgtgcctacgagccctgggaacaggggagaggaaaaagtagttatgaagaacaagctgtttgcatccgtgcccaatattctgttcggcgcgctgatcaccatcgcgccccagacctttgcgcacgcctgcaccggccatgacatgccgggtgcctgccactactcgcagcaggcggccaccggcatcggcgtcgtcatcctcgtgttcggcgtcgtggctttgttcgtcgccccgcagattcgcatcggcctcaatatcgccgccgcagccgacgccctgctactactcgccgtacccacctttctgatcggcatctgcaagggcgcgatgatgcactgtcgcatggttatgctgcccacgctcatcgtgctcggcgtgctcaccatcgtgttcgcggccatcgccatctggctcgactctcgcgccgccaagcgcaactgatcgagcagacggccggagcccagccattgcgaacgctggactccggcctcgcttattgcaaccgcactataagcaacataaggattcatcgtgccatcccatatcgcattgcgcggccttccgattgaaaacctcaaacgcaagccgttccgcaccggcgcactgctcgccgtcgtcaccatcctcgcgctgacattcttcggcggcaccatgctgaccatgaacctcaacactggcatgaccagtatggagaagcgcctgggcgccgatctcatggtcgtgccgcaaaacaccgtgcagaaggccgaagcgctgctcaccaacggcaatcccagcactttctatttcaccaaagacatcgccgacgaggtcatgcaggccgacggcatcgcacaggccaccgaacagacctatatatcatcgctggccgccgcctgctgtgccgaaaagctgcagatcatcggttacgacccggacactgacttcgtcatcgaaccatgggtcgcctcccagttcgaaggcccccttgaagacggtcagatgattgcaggcgcaaacgtcaacgtgtccaccgacggcaccatcgaactctacggccgttcatggccggtcgtcgcccagctcgccaacaccggcaccagcctcgacaactcggtgttcatcaaccaaaacaccgtgcccgacatggtcgccgcctcggccaaggtctccaagcaggtcatgtccgccgaatatgccggcaaagccgtctccaccgtgatgattaagacgcagcaggggtacgaagcgcagaccgtagctgagaacatcaagcgtcttgactcccgattcgccgatttggggtacgtataccccggcggcatcaccgccaacaccagaacttcgctgaccgcgcttgtcacctacctcaagattttcgtggcggtgatctgggtaatgggcgtgattgtgctgctcgccgtattcgcctcgtcggtgaacgaacgcaaacgcgaattcgcgtccctgcgcatcatgggcgccacgcgcggcatgttgaatgccatcattctgaaggaatccgccatcatcggtctgatcggtggcgtaatcggcgtcggcgcggccagcctggtgattttcccattcagttcgctgatcggcaagcagcttcaattgccgtatctgcaagccagcccggttgcggtgatcggattcattgccgtgaccattgtgtgctctacggtcatcggcatcatcggttcgctggccaccatgtggcgtctcggccggcccgaagcctacctgaccctgcgagagggggagtgatatgactgagacaactacgccgcttcagccgaccacggttgagccgaccaagctccagccgaccacgccagctcagccgaacgcgccgactgcgccggattcgccgcacgtaaccgagacgccctccccggaccatctgctgaccttgacggacctgacccgccagttcgtccgccgcggcacgccgttcgacgccgtcagccacgtgaacctcaccgtcgatgccggcgaattcatcgccattgtcggccggtcgggcaacggtaaaagtacgttgatcaacatggtcgctgggctgattcgcccgacctcgggaaccgtgagcgtggctggacgcaatgtgtccgacttgggcgataaagcactgtccgtgctgaggaatcgcaccatcggattcgtgactcaaagccagaccctgctcggcaacctgaccgtgctcgacaacgtgattctgcccgcaacgatgtttccggagccgctgccgttcgcccaaaacgcagaagcaacggatgccgttgctcaggtggacgctgttgcgtcgaccgatgctgtggcacaagccgctgccaccaatgatgaatcggccgccgattcggccgccgacccgttcatgccggatgtcattgcgccaatcacagaccgggaaaacacgccgtcaaacacggctgcgagccgttcggacctgttcgccacccgagctcgcacgctgctcacccagcttggtgtcgccgatctggcagacagctacccgcgcgagctgtccggcggtgaaatgcggcgcgtctccatcgcccgcgcgctgatgaaccagccgagcctgctcatcgccgacgagccgaccggcgacctcgaccaagagagcaccgacatcgtaatgcgtctgctcagagaccaagccaacaacggcacggcgattctcatggtcacccatgatcccgatgcactcgaatacgcagaccgggtgtatcgcatggacgccggagtgctgtccatagcctcggtgtaatatggtctgctggtgtctgccaacaggtagataccgtctggagtcatagcccatcagcgggtcggcggtaggtaatcgcaagagaaccaacccgttcgtgttcgttcacgacgaagcgctggggaggcccgactcagcgcttgccaggcatatgcaaggcaagcgttccgttcagataacgacagaaggattaatccaatgacgaacgttcagcgttctcgccgtcaggtgcgtctgtctcgcgccctcggcatcgcactgacccccaaggctcagcgcatcttcgaaaagcgtccgtacgctcctggcgagcacggccgtgaccgccgccgcaccgagtccgattacgcggtgcgtatgcgcgaaaagcagcgtctgcgcgctcagtacggcatctccgagaagcagcttcgcgccgcttacgagaaggccacccgtactgccggccagaccggtaacgccatgctgaccgatctcgagacccgtctcgacaatctggtgctgcgtgccggcttcgcccgcaccaccgcccaggcccgtcagttcgtggtgcaccgtcacatcctcgttgacggcaacatcgtggaccgcccgtcctaccgcgtcaagcccggccagaccattcaggtgaaggccaagagccagaccatggttccgttccagatcgccgccgaaggcgtgcaccgtgacgtgctgcctgcggtccccggctacctcgacgtgaacctgccgtccctgaaggccactgtgacccgtaagccggaggtcgaagagatcccggtgcaggtcaacatccagtacgtggtcgaattctacgcccgctgatccgggccctctggtcaacaaatccaggacataccgctcgaaccccgcgcttctttcgagaagccgcggggttcctgcgttgtagggcgattactggccgcacaccgcctggcgaatcatcgtcgcgtacgcataggcaccggtcatattcggatgaatgccgtcatcgttgaggtattcgctatgaccttcgctatacccatgccaatcgatgatgcccacgttcttgttcttcttggcggcctcacgcagcatcgtattgttgttgttctcctgccacgggtatggcatacggatggtgatgaagtatgtcggcttgccgccggtcaggtcaatgagctgttgcacttcctgctcattcgaaatcacgccgttcgtgccgaggccaaacaccaccacactgccactgtggccggcagcggtgtcctgctgatacacatccaccgcctgcggcagctgacggttcggcaggccatcgataaaagcgttcgggaatgcggcctggatggcgtccgaagtacccgacgtcactgaatcgccgaccatcatcatatccgcgttgcagctttccgttgccggatcataggcgtacttcgaaatgtcaagattgtttggcaccttttccgcaatcggtttgatgatgggcggctgagaatccgaaccgttcttattcgcgtcagcggtattggtttcgccgttcgcggcatttatggcagaagactcgggctcgggcttcgccggtttcttgaccggcttggcgggtgccgcgagttcggggcgcagctgaatggctcgcgcttgagcgatgccattccagtccaccggtgcccacgtcagcgccacaacggtcaccaatccgataaccgacatgacccacgcgcccgggcgcagccggtagccggctttcggcagcggcttggcgtgttggctacgaggcatctgcaccgatttacgggccgcctcgaccagctggtagaaggcttccgacgccgccaacaccacgacggcctcaagaacccaaccccaccacggcaacgcctgcgttcgtgtcgccgggttcatgaactgcagcagcggataatgcatgacgtacagcgagaacgatcgcgacccgatatagcgtaggggagcacaacccagcacgtgcgaccagattgagtcattgttcacggcacaggccaaggcgcacaacgatatgaacgcggtaatcaggtacccgccttggtacatgtacgacagatacccgttggcgaaccagaatccggtcagcagtgccgccaaagccgcggtgccaagaacattgcagacgatagtgagacgggcgcccgtcttgtcgccggcctgacgttcgatctgcactgtttgcgaagccgctccagcttccgcagcttccgtacctcgcgaggaaggcgcaatccagatagccaacagcgcgccggcggccagctcggcgaggcgagtatcggtaccgtaatacacgcgggaggtattggccgggtcaaacagcagcaccatgtcggcggtggaagcagccatgatgacaagaatcgccatggagcgcacccatttggacttggtgattttgccgagcaccaccatcagcaacggccaaaccagatagaactgcatcgtcacgcccaagaaccacagatgggtcagaggagaaggcaatccggccgcctcgaaatacggcaccttgcggaagatgtacacccaattgctggcgaacaaggcgctcggcagcgaatcggaaaccactttctgcaacaggctgggagcgaacatccaagtgagccaaggcaccacggcaatggtcgccagcatcaccggccataaacgagtaatgcggcggatcagatatcggccatatccaaaggacccggtgcggtccaccatgttcagtaccgaacgtgtggcaagaaaaccggtgataacgaaaaacatcgtcacgccaatgaatccgccctgcaatagcgacgggcgggtgtggaatgctatgactccaagaatcgccagagcgcgcagtccatcgatacccctgaaatgggcaggcacagacgatcgagatggtgcaggtttcaaggttatgctcacagtattctaagtgtactctcaggaatcgttaggtatactgcccggattacgcatatctcaggtagtgacctatgccgttatgacttatgacttccggcaacccgcaccgaaaccgccggaatggtgacataatcagaaccatgattcttcatctgcatctggtccgtcacggacagacctatttcaaccgatacaaccgtctgcagggatggtcgaattcgccgctgaccgagtcgggcgtcgccgatgccgtcaaggccggtgagcgactgaaaggattgacgttcgccgccgcctactgttcggacaccacgcgtgcccagcagacggccgagaaaattctcgacatcaacgaagccgcgggtaacccgcgccccgcactcgtgacggacatgcacttccgcgagcagttctacggctactacgagggacttgacatggccatggcctggtacgccgcgggagcgccccacggcgtcaaaacctacaaccaaatcgtcgagaagttcgggttgggggcctcgcgtgattttctcaaggaagccgatcccttccacgacgcggaatccgatgaggaatattggacgcgcgtcgaaggtgcgttccgtcttatcgccgacaacccgaatctcaaggacggcgacgatgtgctgcagatttcgcatggcaacacactgcttagcctcggtcaccggttcggcggccctgacctcgatctgaacgaacgcccggccaatggttcggtaaccgtgatcgacttcgacaccgacaagccgttcggcgaagccgtgaccatcgtttcgtacggcaagtagcaaatagcaagcaatacatatcgaatagcacgtacggtccacggcggcacgccgcaaacgaaagcgtcagcaggacagcctttcgcctatagccgcatacgcccacgcgcacggttttcgccctgcgcatgcaatggtatgccaagaaatagggaaggagtgctacccttaggcgagtaagtgtgaccgcaaggaggaaacaatgggagtcggagagatcgctggcctgatcgcggccatcgcgttcgcagtattggccggtttcatgatctatccgctgatcaggctgggcaagatgtttgatcagatatcgcagacggtccgggagtccggtgaacacgccatccccgcgctggacgaaggcgtgaccaccgtcaagcaggtcaacaagtcgctcgaagacgtgaacaagatttccgccgcggcttccaccaccgccaacaacgttggtgcgttgaccgatctgtatggctccttcctcggtaagcccatcatcaagatcgcttccaccttctacgcgctgaaaaccacgggtcagtccttccttgcgaagaacgccgcgaaaaccaccgtcaacgacaccgccgagaagggggagtgatgttcaaacgcatcttctgggtcggcgtcggcgtggccatcggaatcgttgccgtcaccaaggcacaggcctatgtcaaggccaatacgcctgatgcggcacgccagttcctgcttggccccgatcaggacaatgtgccgatgaaaacactcgaagggttggtcaacgagttcaatgccacccgtcgagcccgcgaggctgagctcaaccgtcagtacatcgagcgcgccaactgacacgcgcatgccgccttgccatctagtcactgaatcagctagaacaaactaatcctcataatccagtcttttccaccaataccaggcgcaactgcgcccattacccaaacaaggagttcatccgctcatgcgcactgcggacatcgcaaagcgatacctcgattattttgccaagcacgaccatctcatcgtgccctcggcatccctgatttccccgaaccccaccacgcttttcaccatcgccggcatggtgccgttcatcccgtacctgatgggtgagcagaccccgccgaagcgccgcatggcctccaaccagaagtgcgtgcgtacgctcgacatcgacgaggtcggcaagaccacccgccacggcaccttcttccagatgctcggcaacttctccttcggcgactacttcaaggaagaggccatccactacgcctgggagctgctcaccacctcgcaggatgagggcggctacggcttcgaccccgagaagctgtggatgaccacgttcaccgacgatgacgaagcccgttccatgtggatcaacgagggcgtggaccccgagcacatccagaagatgggcatggaagacaacttttggaccaccggtggccccggacccggcggcccctgctccgaaatctacgtggaccgcggccccgccttcggcaaggaaggcggcccgattgccgacgagaaccgctacatcgagatctgggacctcgtgttcgagaactacgaggtcgacaacgtcaagtccaagaccgacctgcacatcgtgggcgagcttgagaacaagaacatcgataccggtgccggcttggaacgtctggcctacctgctgcagggcaagaacaacatctacgagaccgatgaggtcttcccggtcatcgaggccgccgagcagctctccggcctgaagtacggcgagaacgaggacgccgacgtgcgcttccgcgtggtcgctgaccacgtgcgctccgccctgatgatcatgtccgacggcgtgcgcccgtccaacgtgggccgtggctacgtgctgcgccgcctgctgcgccgcaccgtgcgctccatgcgcatgctcggcgtgaccgatccggtgctgcccaccctcttcccgacctccaaggccgccatggaggccagctacccggagctcaacgacaccttccatgaggtgtccgaatccgcgtatggcgaggaagacgccttccgccgcacccttgagaccggcaccacgattctcgacgtggccgtcaacaaggccaagagcgattccgccgagcccgtcgtggccggcgaggacgccttcaagctgcacgacacctacggcttcccgattgagctgaccctcgagatggccgccgaacagggcgtgaaggtggacgaggccaagttccgcgaactcatggccgagcagaagtcccgcgcccgcgccgacgccctcaagaagcgtcacaacgtggatctttccgtttacgacgacttcaagaagacgctcgtcagcccgatcgacttcctcggctacaccgacatgtccgcccgcgccaaggtgatcggcatcatgcaggaaggcaagggttccgtgcccgccgtgaccggcccggccaacgtcgaggtcatcctcgaccgcaccccgttctacgcggaggccggcggccagctcgccgaccagggcgagatcctgtccgacgacggcgccgtgctcgaagtcgacgatgtgcagaagcccatcaaggacctcatcgtccaccagtgccgtctgaccgaaggcacgctggtcgtcggcgccgaagtcaacgccaacatcgacctggcccgccgtggcgccatcgcccgctcgcacaccgccacgcacatggtgcacaaggcgctgcgtgaggagctgggcccgcaggccacccagcgcggctccgaagacgccccgaaccgtctgcgcttcgacttccagtggtccaaggccccggccaagtccgtgatctccgcagtcgaggagcgcgtcaacgacaagctgcgcgacaacctcgccgtgaccaccaaggaaatgaagttcgacgacgccatcgccctcggtgccatgcacctgttcggcgagaagtacggcgacatcgtacgcgtggtctccatcggcgaagacggctggagccgcgagctgtgtggtggtacccacgtggaccacgttggcaagatcggcatggtcaacatcctgtccgaagcctccatcggctccggcgtgcgtcgtgtcgacgccgtcgtgggccagggtgcctatgacttcaacgctcgtgagcacgcgctggtctcccagctgtccgacaagctcaacgctcgtccggacgagctcgccgagcgtgtgaacgccctgctcgccaagctcaaggaatccgatcgtcgcttggcctccatgtacgagtcccagctggccgcctcggttccggcgctggttgctgacaccaagaactccgcggccccggtcaaggtggccgtcaagaacgtgggccactttggcgcggtcgatgccctgcgcaagaccgtactcgacgtgcgcgcccagctcggtgaagacgcccccgtggtggtggcccttgccggcgtgaacgaggatgacaagccgatggtcgccgtggccaccaacgaggccgcccgcaaggccggcatcaaggccggtgatctggtgcgtggcgcagccaaggtcctcggcggcggtggcggcggcaagccggacttcgcccagggtggcggtgtcgatgcctccaagatcgacgaggccctcgaagcgctcaagcacgaggcgcagaaagcctgattccgccagtggtgtggttaggcgttgatttgggtaatgcccgggtcggactggcactgtccgacccggagcttacctttgcacatcctgctggcaacattcatgttgccggcgactatttctttgctattgacgaggtcctgaacgtcatcgaagacgaacatgtggaccatgtaatcgtcggactgcccctgcagatggacggtacagaaggcaaaagcgccaaaaaagcgcgcaggtgggcggccaatctggagaagaggctgcaagcagagagtgaagacagtgattctacggagtatcagattccgcaggtatcattgatagatgagagattgacaacagtcagtgcgcatcgtcagctgttcgaggcccataaagcttcgaacaagcacaggccggtggttgaccagcagtcggcagtggtgattttgcagacggcactcgaccgtacccgggagcagtgaggtatcggttatgaccgatgattttaacgagttctttgatgacaacacgcattgggtcgaacaggggtcagaaccaatgcgcggggccgagccgccagaaccgccgaaatcccgcagggagatgcgcaagcgacgtgcacagcgcaggcgcaagcgtatcagtggcattatcatcgctatcgccatcgtcgccctgcttatcggcggcggctatttcggcgtaaccaagctcatcgcatggcgtgacagccggagcaaccagtcgacggccatcgcggactatccgggaccgggctatggcgaggtcgaattcaccgtgagcgagggccaaggcgcggcggagatcgccgataatctgctcaaggccgaagtcatcaagtctactgccgcgttcaccagcgtggtcaacgccaatagcacgacactctatccgggaacgttcacattgaagaagcatatggccgcatccaaagtgatcgacgttctctccgacaccaaccaggcggcgggcttcctcgaggttcgtcccggtgaacgtgccaccgatgtgttcgccaacgccgcgaagctttccggcattgcccaaagcgaattcgacacgattatcaagaacaagggtaaggatattctgcccaatgaagcgggcggtagctttgagggatggctggagccgggaacctacaacgtcaagagcatgaagagcgcttcggaaatcctcaaggccatggtcgataagcgtatcgccaagttggatgaattgggcgtgccggccggcagtgaccgtgaacgggtgatgatcatcgcctctatcgccgaggccgaggtcaacaaagccgattactacggcaaagtgacgcgagtcatcgagaaccgtttggagcagggcatgtcgttgggcatggattccaccgtggcctatggcaataacgtcaagcccgcgcaggtgaccaccgagatgacccaggacgagtccaacccgtacaacacgtacaagatctccggcctgccgcctacgccgatcagcaatcccggcgataacgccattcaagcggcactgcaccccgaaggcggcaattggctgtacttctgcacggtcaatctggacaccggcgaaaccaagttcgccgcaaccgccgatgaacatgaccagaacgtggccgaactacgcaagtggcaagccgaaaaccagtagtcatcccgttagcttccttcgcttggggaagctgatcggacgttggtctcttcattggctccctcgccgaggggagctgtccgcaaaaaagcggactgaggggagcactgcagggaatgtaacgctcaacttaagcccggggctcccgcgaagcggatggaagaaatctaggacaacaccccaacagccaccgccacaatcgcgcccgccaatatcaccggcacatacggcaccttgcccgcatgtgccggtgatgtgcgttgtgggtcgaatcgcgtccacaaggcaatccatgtgatgccggcaacgcccatcgccagccaccagaccaccacaggcaacaggccaaacagtccgacagacaatcccataggtatcaaggcggtcacatcgccgaatcccaatgaccgaggcaccagcaacgccaacgcgaactggatcaggcaacatagcacggtgaacaacagcgcctgcaacagcacgaacaggtcgttcaccaccactccatacgcgaaatcggcggccagctgaagcaacgcgcccgcagccacccacgcgatcggcacccgccgatgacgaacatcctcaatggacagtgcaagcccacatagcagaccgggtagcgtgaacaggtatggcatggcttaacattaacccctagctagacgtacacatagacgtacacacatgaaacgagggaagttatgctgcgttggcagacggcaggggagtctcacggagaagcattggtggccatgattgaagggttgccggccggcgtgcgtattagcacggacgatatcgtttccgcactggcacgccgtcgacttggatatggtcgcggtgcccgcatgaagttcgagcaagacaaggtccgtctgctgaccggtgtacgccacggcctgaccctcggctcgccggtggccatcgaaatcgccaacaccgaatggccgaagtggaccgaggtcatgagcgccgatgcactcgaccatgacctgccgcgcgaaggccgcaatgcgccgctgagccgcccgcgcccgggccacgccgatctgaccggcatgcgcaagtatggttttgacgacgcccgcccggtactggagcgctccagcgcccgtgagaccgcctcccgtgtggctttgggcgaggtggccaagcagttcttggatcaggcgttcggcatccgcaccgtagcccacgtggtggcgcttggtggcgtgcagaccaaccccgacctgcctctgcccacccccgacgatctggaagcgcttgatgcctcgcctgtccgtacgctggacaaagaggccgaagcccgcatcatcgaacgcatcaacgaggccaagaaggcctccgatacgttgggcggcgtgattgaagtgctggcttacggtgtgcctgccggcatcggcacgtatgtggagtccgaccgccgactggacgcggctctggcctccgcgatcatgggcattcaggcgttcaagggtgtggagatcggcgacggcttcctggaagcctcccgccccggttcgcaggcgcacgatgagatcgtggtcaacgccgacggccgtatcgaccgtctgtccaaccgcgcaggcggcattgaaggcggtatgtccaatggccaggtgattcgcgtacgcggtgccatgaagccgattccgtccatccccaaggccctgcgtacggtcgacgtgctgaccggcgaatccgcacaagccatcaaccagcgttccgacagcaccgccgtgcctgcggcatccgtggtggccgaggccatggtgcgtctgactttggcgaagtacgcgctggataagttcggtggagacagtgttgccgaaacacggcgcaaccttgagtcgtatcttgcctcgtggccggagcacatgcgctgaacgaagggcgtatggtttcgtgacgactgccgcggaaccatcagcaactgtactcaccaatcgtcgagaggattcgtagattatgaccgcacgcccccgcgccgtcatcatcggcatgatgggagccggcaaaacacgtgtcggtaaggaagtggcgcatatgttgcgtctgccgttcgccgatgccgatgtggagatcgaacgtgaagtgggcatgaagattccctcctacttcgaggaatacggtgagccggcattccgcgaggtcgaggccgatctcatcgccgatatgcttgaggatttcgacggtatcttttcgctgggcggtggcgctcccatgacgccatccacccagcatgccctcgcctcctacatcgaccatggcggtcgtgtggtctaccttgatgccgatccggcggaagccatggaacgcgcgaaccgtgggggaggccggcccatgctcaatggcaacgccaactcccgttggaaaaaactgttcaagcagcgtgacccagtattccgcgaggtcgccaacgttcatgtccatacccgggggcttacgcctcagggcgcagcgaagaaagtgattgatatggtatctgagcgagcagtgcatgttaccggagcggcaattgagccgtatgatgtggtcattggcgaaggtgccatgaaccatctggtcgacgtgctgggacccaaacccgccaaaatcgcgcttatccatactcagccggtgcagcgacactccgatcgcgcccgcgccctgttgcgtcagggcggctatgaggtttccgacatcgtgattccggatgccgaacccggcaaggccattaccgtggccaacggcatttgggaacgccttggcgacgaaggtttcacccgatccgatgccgtggtggggcttggcggcggtgccgcaaccgatttggccggtttcgtggctgccacgtggatgcgcggcgtgcgctatgtaaactgcccgacctcgctgctggccatggtcgatgcttccaccggtggcaaaaccggcatcaacaccccgcagggcaagaacctcgtcggctcgttctacacgcctgccggtgtgctggccgacaccaagacgctggctacgctgcccaatgacatcttcatcgaggggctcggcgaagtcgtcaaatccggtttcatccgcgaccccgaaatcctgcatatcctcgaagaccacgcagctgaactgcgcgctttcgacggctctacattcctcggctcgccgctcgaagacgtggttgccgagctcattgagcgcacggtaaaggtcaaggcctaccacgtctcctccgatttgaaggagaagggtctgcgtgaattcctcaactacgggcacacgatgggccatgccatcgaaaagctcgagcacttccgctggaggcatggcaatgcggtggccgtcggtatggtgtatgccgccgagctggcccatctgatcggttacatcgatcaggatctggttgactatcaccgctcgttgctcgcttcgctgggtctgccgacgtcgtggaatggcggctcgttcgacgacgtgctcgcattgatgcatcgcgacaagaaagcccgtggcaacgaactgcgcttcgtggtcctcgacgagattggtcacgtcgtacaccttgacaacccgcccgccgaagccgtagaagaagcattccgtcgtatccagcagtaattgaacggccgtaggccgtgccgttcgccatcccctcagaaaaaaagtacttggctcccctctaacggaggtgccccggagtcggatttaccttttacctccctctgatgagggaggtgccccgaaggggcggagggagagaagcacaaacaaaaggagtcccaatgaccaaagtcatcgttgtcaatggccctaacctcggacgtctcggcgtccgccagcccgacgtctacggtcgtcaagacctcgacaccctgcgcaagctctgcgccgaatggggcaagggcctcggcctcgaagtcgaggtgcgccagaccgacgacgaagccgaaatggtgcactggatgcaccaagccgccgacgagaaaaccccggtggtcatgaaccccgccgccttcacgcactattcgtatgctctcgccgacgccgcgcacatggtcattgatgagaacctgccgcttatggaagtccatatttccaacccgtccgcccgcgacgagttccgcaagcgttccgtaatcagccctgtggccaccggtaccatcaccggcatgggtttctacggctacaagctcgcgctcgatgctgtggcgcacttgctgagcgaatagaaccaagccctccagccaatcccgggtagcagtcgacgttgcgcccgggattcctgttacctgaggaaaccataagcgtccaagtaaaggaagccatgactctcaccgccacggaacgtgatctcgtcgatgccgcgtcacgctggtttgacgcccaccgcgcacagttcgtcgatgagctgtgtgagctgctgcgctacccgtcggtttccgacgaatcggacccgaatcctcgtccgggcgcgccttatggacccgaagtacgccgtgtattcgaccatatgctggccaaggcaggacgagacgggctgcctacgcgcgactacaccggccacgtcatggaagtcgtttatccacaggagaacgtggagaccgaccgtgacatcgccttcgtcgaccacctcgacgtagtccccgccgacgacggttggacgcacgatgccttcgatccgcaggttattggcgatattgttatcggtcgcggctcattggacaataaaggcgtcgcgctgaccagctatttcctactccgtttcttcaaggaacacgaccaccgtttccgccaccgcgtacgtatactgttcggcggctccgaagagatcgcgctcaacgacatcaaatggttcgtcgccaacatcggcgcgccgtaccaggccatcgtcaccgatggtcccttcccggtgaacaatatccaaaaagggctgctcgatgtggatgtcgaactgccggtcgggccgcaattgcgcggttggcatgccggcaccgccactaacacggttcccggggccgccgcaatcaccctcaccggcgtcgacgaatctaccgtgcggcaagcattctgccagagcggcaacatcgctccagatatcgccgagcgattgcatatcaacgcaacagcgcaaggcgtcacgattgaggccaccggtgtcgccggtcatgcctgccagccgtccggtaccgtaaacgctatagcggtgctcactacggcgcttgcccggtccggtctgctcgaaggccgtgacctcactgcagcgcaggcgattgcccaatggacaaaagactcatatggcaccggcttgggtatcgattgcgagaatgcggaaagcggaccgactaccgccaatggtggtttgattatgccggcgaatgagttcgctgaagcagacaaggtattaggcgcggtatcaggtgagacttctgaagatgccatcgtattgcacttcgacatccgttatgcggtaggccaggcacacgaacaaatcatcgagcgtattcaagcacaagccgaagcggcgggcggccgcattgtcgacatccttaacgatgacccatactacgtgcaggctgacgacccgcgtgtccagttgctcaccgcaacctacaacgacgtgttcggttgcgaggctcgacccgtggctgtcggcgacggcacccacgcccgctttatcccgcgcgcactcaacttcggtcccgaattccatgccgaccatgtgccggcggtcgacggcatcgacctggagaccccgccattcatcgcaccaggtgccggcaacgcgcacggcgccgatgaatgggcctcgctgaaaaacctgaaaacagcgtttgtcctatatgcgttaggcctagtgcgtctcgaccaatacctgcaatagctggcggataagacgtttgacgtgattatgaccttgcgtatgctttttgacgagcctactattcgtattgttcaagtacgccatgtcggggccgacgcgtctggtgaacacgccgggtcatacacggatgatagagtgaaattccatggttagaagaacacatggtaattctcaagaacacgtcaccaagcatattttcgtcactggcggcgttgtctcctctctcggcaagggcctgaccgcatcttcgctcggtcgtttgctgcgcagccgcggtatccatgttctgcagcaaaagctcgatccgtacatcaacgtcgacccgggcaccatgaacccgttccagcatggtgaggtctacgtgaccgaagacggtgccgaaaccgatctcgacatcggccactacgagcgtttcctcgacgtcttcctgagccagaaggccaacgtcaccaccggtcagatctatcaggaagtgctgcgcaaggagcgcgccggcgaatacctcggccagtgcgtgcaggtcatcccgcacatcaccaacgaaatcaagtctcgtatgcgcgcccaggcttccgatgacgtggacgtgatcatcaccgaaatcggtggtaccgtcggcgacatcgagtcccagcccttccttgaggccgcccgcgaagtgcgccgcgatctcggcccggacaactgcatgttcgtgcacgtttccctggtgccgtacatttccgccgcccacgagctcaagaccaagcccacccagcactccgtgatgatgctgcgtcagctcggcatctccccggacgccctcgtgctgcgttccgaccgcccgctcaaccagtccatcaaagacaagatctccctgatgtgcgatgtcgatgccgaaggcgtggtcaactgcgtggatgcgccgagcatctacgatgtgccgaagatcctgttcgaggagggcctcgacgcctatgtggtgcgtgagctcggcctgccgttccatgacgtcgattgggacgaatgggccgacctgctggagcgtgtgcaccaccccaagcacgaggtcaacatcgccatcgtcggcaagtacatcgatctgccggacgcctacctgtctgtcaccgaggccatcaaggccggcggctttgccaactgggccaaggtcaacgtcaagtgggttgcggccgatcgttgcgaaaccaccgaaggtgcggccgccgctctcgacaacgtcgacggcatcgtgatccccggcggcttcggcatccgcggcatcgacggcaagatcggcgctctgaagttcgcccgtgaaaccaagctgcctgccctcggcctgtgcctgggcctgcagtccatggtcatcgaatactcccgccacgtgctgggcattgaagacgcgaactcttccgagttcgagcccgattgcgccaacccggtgatcgccaccatggaagagcagaaggacatcgtggccggcaagggcgacatgggccacaccatgcgtcttggctcctacccggctgagctggaggaaggctcgctggtcgccgaactgtacggcaccacgcatgtcaccgagcgtcaccgccaccgttacgaagtcaacgtggcctacaaggatcgtctgcgcgaaggcggcctgcgcatctccggccagagcccggacggcgagctcaccgagttcgtggaactgccgcaggacgtgcacccgttctatgtggccacccaggctcacccggagttcaagtctcgcccgaccaagccgcacccgctgttcgccggcctggtcaaggccgcgctcgaccatcaggcggcgcgctgacgcactttcgtgccgtgcataatatcgcggcatgatgtgctggctgccgtcatcggcgtagtgcaagacatacggtaaagacgtggtggcgaaatatctaatgatgtttcgccaccacgtcttttttgttgtatgagcagcatgcagcatgatgtattggaaggcgacggtaaaaaattaccgtttctatggtgtgttggtagtatgcagataacgcttagtaggccatcgcagaaagaccgaccatgaccgaacaccttgatgactcgacccagcagtttgcgcctctgtttggtgcgaataatgccgtcagcggcactgtggcagacagtgtggatgctgctgcatcagattccattcagggcgatgagatgaggaggcgccgcatctggccgtgggtggtgattgcttgtctgctggttgccttgggggctgcctgtggcggcggtgtttggttcttccaagatcatgtgctgcctggcacaacgctatggggaaattcagttaccggcaaaaccgagcaggagattgtcgacctaatcaacgaccaggtcgacaacaccgcggtacgagcgaaataccaggggcagtcggcgacgttcacgctgaaagatctcggcatcgaagttgatggtgaagcaatcgcatccgatgtcatcaatgcccaacgcggtgacgcatggtggcaacagtatgcgttctggattacgcatgatgtggccccgcaaatcaatcccgagctcgctgatggcagtgtggtagataaggcgctgaacattgatgcacaagaacctgttgacgcgcaagtcgcattgaacgataacaacagtggcttcaacgttattgcgggagaaaatggccagggagccaacgccaccagcattgcgaagcaagccatttccacagtggagtcattgggcagtgtccagccacagaccgttcggatggaactcgacgtaaccgaaccgacgattaccaatgcaattgccgatgaggcgaaaaccacgctggaaaccctagtgaacaatgccgtggccatcaaggtggcggataaagacatcgccaccgtgaatgcgtccatgctgggttcggccatgcgcatcgacgccaaccagcagtcaaagctgaaagacaatgaagtacgtaatggctacgtggtttttgatgccgataagctgcagcaatactatgacgagcaaatcaagccgaatctcaaattggaacgtgaagacaagaaggtcgtcgtcaataatgctggcgaggtgctgagcactgaaacagaaggccatgatggcattgtgattgccgatggcgcggatacggaggttggtgctcgcttggctcaggtgctggccacgggaactggctcagtgaatgtggacggcaaggtagatcccaaacaggaagtcaaggtcactcatcgcgtggcgattgacctgtccgaccgtaagctctatgcctatgagaatgacacggtggtcaagacattgaatgtcgtggtcgcggagggcaacgacaacgtcaccggcgaatgcgttggcatgatgtgtacgccgacaggtgacttcaacgtatggcaaaagttgcccagtcaagatatgagcggcacgctgaatcttgccgatggcacggtggaaacatgggatgtcaaagacgtgggcttcgtcaactacttctcctccggttgcgcaatccaccgtattgccggcggatatgtagcggatgccgtaatgccctccattgccaacggatctcatggttgcgtgggtatcggatgggatgtcgccgaatggttctacaactggtgcaatatgggcacgagcgtgcatatccaagtgtgatatgcaacagtgtgatatgtaacaaatacggcatgcagtggtgcgacacataatgccgcatacgcgatgttcggtgtgcatgggacaagcttgcccggctccaatatcgctgtatcgcattcgtgtaatcaagcccacagccaatatgcgtcagggcagctagtgtttgcacttgggttctgctaggttttcataggattaagtgtgatacaaggaaggcaggatggtgaccgaaaacacagcaccaaacgccgccgctgacgtggagatgagccagtatgtggctgatcgtacccgcgtcaacgaggacaagatcaagaaggatgacgagatcatcagccagttcggcgactacaactatggttggcatgattctgatgccgccggcgaagccgcaaaacgaggcattgatgagaacgtcgtacgcgcgatcagcgccgacaaaggcgagccgcagtggatgctcgacatgcgtctgcgtggattcaaggcgttcctcgaaaagcccatgcccgattggggtgtggatctctccggcttcaacgcagacgacttcaagtactacgtcaagccaatcgacaagcaggcgaaaagctgggacgaactgcctgacgacatccgcaacacctacgaccgtctcggcatcccggaggcggagaagaaccgcctcgtctccggcgtggccgcccagtacgagtcggaggtcatctacaactccatccaggaggacctgaagaagcagggcgtcatcttcgtcgacacggacaccgctgtgcgcgaataccctgaactcgtcaagaagtacttcggcaccgtcgtgcctccggaagacaacaagttcggtgccctcaacaccgcggcatggtccggcggctcgttcgtatacgtgccgaagggcgtgcatgtggacatcccgttgcaggcgtacttccgcatcaacaccccggccatgggtcagttcgagcgcacgctcatcatcgcggacgaaggctcctacgtgcactacgtggaaggctgcaccgccccgatctggtccgaggactcgctgcacgccgccatcgtcgagatcatcgtcgaaaagcacgcccgcgtgcgttacaccaccgtgcagaactggtcgaacaacgtctacaacctcgtcacccagcgtgcctacgtgcgcgagggcggcacgatggaatgggtcgacggcaacatcggttccaaggccaccatgaagtacccggcctgcatcctcgccgaaccgtacgccaaggcatccaccatgtccctcggcttcgccggcaagggccagtaccaggacacgggcgcgaagatgattcacctcgccccgcacaccagctccaccatcgtcgccaagtccatttcccgtggtggtggccgctccgcctaccgcggtctggtcaaaatcgtcaagggcgcgtacggttcgtccaactcgaccgtgtgcgatgccctgctggtcgacgacttctcccgctccgatacctacccgcatgtcgacgttcgcgaagacgacgtttcgatggcccacgaagccaccgtttccaagatttccgaagaccagctcttctacctgatgagccgaggtctcacggaggaagaggcgcgaggcatgatcgtgcgcggcttcgtcgaaccgatcagccgtgagctgccgatggaatacgcgcttgaactcaacagacttgtggaacttcagatggaaggatcggtgggctgattccgatgaccgacaacacaacacccgtcaaggaaatcaagattccggtcgccgaccccaacgacccgtacgcgattccggccgctatgccgtcctccgtggaccatgccgtgcgctcgttcaacgcaggcgactacccggagcccagccgcaagcaggacgaatggcgctacacgcctatcgagcgcatcaacgagttcttcaccgtgttcaagccttccggcgaaacgcagatcgaagtctccatgattgacggctcgccgttggccgaaggcgtgaagctcagccagatcaagctcggtgagggcctgtccggcactgtgtccaagcccaacgaccgcgtctccgcagtcgaatgggaatccggccgcaccgcaaccattctggaactgtccggtgagatcgcccagcccgtgctcgtcaaggtgcacggcgcgggggaggacctcgacgctttccatctggtgatcgccgccgccgacaaggctcatgcggacgtcgtcgtggaacacgacggtgacgcacgactggccgaaggcgtggaaatcaccaccggcaaggactcgcacgtctccaccacgttcgttcaggaatgggccaaaaccgccaagcatgtggccaaccaccgcatccacgtcggcgaaggcgcatccctgcgccactccgtcgtgaccttgggcggcgacatcgtccgcatccgcatggatcaggacttcggcggcgaacagggcgacctcaacatgctcggcatctacttcgtggaccccggcgagcacatcgaacaccgcacgatggtggtacacaaccaccccgactgcaagtcccgcgtggtctacaagggcgcgcttgacggcaagggcgcgcactccacttgggtgggcaacgcgctcatccagcccaccgcccccggcaccgactcctacgagctcaaccgcaacctggtcctgaccccgggcgccatcgccgattccgagccgaacctcgaaatcgaaaacggcaacatcatcggtgccggtcacgcctcttcggtgggccgcttcgacgacgaggaactgttctacctcgaatcccgcggcatccccgaaaccgacgcccgcaagctcgtggtgcgcggcttcttcggcgaactcgtcgaggagatcggcattcccgccatctccgaacatctgatgaccgtgattgaccgccgactggcccgtggtgaaaacgacgccatggcacaggtcctcgaagacaagtaagaacagcatttttaggagcacaacaatgtcaacactcgaaatcaaggacctgcacgtccacgtcgaaaccaaggaaggcatcaagccgatcctgaagggtgccaccctgaccgtccactccggcgaaacccacgccatcatgggccccaacggttccggcaagtccactctcgcctacacgttggccggccaccccaagtacgtggtcgactccggcgaggccctcctcgacggcaaggacatcctcaagatgactccggacgagcgcgccaaggccggcctgttcctggccatgcagtacccggtcgaaataccgggcgtgtccatgaccaacttcttgcgcaccgccaagaccgaaatcgacggcgaggctcccggtattcgccagtgggccaaggacctgtccgcagccatgaagcgcctcaagatggacccgaagttcgcctcccgttccgtgaacgaaggcttctccggcggtgaaaagaagcgcgccgaagtgctgcagctcgaactgctgaaaccgaagtttgccgtccttgacgaaaccgactccggcttggacgtggacgccctgcgcatcgtgtccgaaggcgtgaaccgcgccaaggaagccaaccagttcggcatcctcatggtcacgcactacacccgtatcttgaagtacatcaagccggacatcgtgcacgtgttcgccgacggccacttcgtcaagaccggcggccctgagctggccgacgaactcgaagagaacggctacgaccagtacctgcccgaaggcgccgactccgagtccgcactggcctgagtccgtgaccgtgggagtctgacatgccctattctcgacacgctccgggccgcttaggccaggtctttacggtcgcgaacaggccatgtcagactcccactcgtttcgtacaattgttacgtaagtagggggaacataatggttgattttaaggcgattcgggcgcagttcccgattctggatcaggagattcacgggcacccgctcgtgtacctggattctgcggccacctcgcagaagccgaatgcggtgatcgacgccgaggcgaacttctaccgtacaattaacgccggcgtgcaccgtggtgcgcacgagctggccgcccgtagcaccatggcctttgaggaggcccgagccaaggtggccaagctggtcggcgcgaatgcggccgaaggtgaagaggaggtcgtcgtcaccggtggtgccacggccggactgaacctgctcgccaccgcattcggcaatgcatcgctggggcgtgggggagaagccgccaagcgttttgccctgaagccgggcgatgagatcgtcgtctcgcgtgcggaacatcattcggtgctgctgccgttccaggagctgtcctaccgtaccggcgccaccttcaagtggatcgacctgaccgaggacggccgtgtgcgtacggacaacctcgacgaagtcatcaccgagcgtaccaaggtcgtggccgtcacccacgtgggcaacgccacgggtgccatcaccaacatcgccccgatcatcaagcgtgcgcatgaagtaggttcgatcttcatcttggacgcttgccagtccgtaccgcacctcaaggtcgatttccacgcgcttgatgtggacttcgccgcctggagcgcgcacaagatgtacggtcctaccggcgtcggtttcctgtacggtaagcgcgacctgctcgaagccctgccgccggccaacttcggcggctccatggtcgagctcgcctacatggaccacgaggcccaatacatggcccctccggcccgcttcgaggccggcacccagccggtcgcccaagtggtggccgcaggcgtcgccgccgaatggatgatgaacatcgggctcgagaacatcgaagcccatgagaagaccatcgccgccgaactgctcaagctcggcgacgtcgatggcattcgcatccttgggccgcgcgaaaacgtggaccgcatcggcaccgtggcgttcgacgtggccggcgtgcatccgcacgatgtgggccagttcatcgacgcccagggcatcgcgattcgcgtgggacaccactgcgcccagccggtacaccgccacttcggcctatacgcatccaaccgtgcctcctccggtgtctacaattcggtcgaagatgcccaagcgttggtcgaagcggccaagggcatccgtaagttctttggagtggagtaaaacagaacaccatgaacgaattcggtatgagcggggatgacctcgaacagatgtaccaagaggtcatcctcgaggcgtcgaaacatccgcatggcaaggaatcctttgcgcccaacgcagcggtcgaacagtccgcggacgcagcggccaatgtcaccgtacaagccagccacgaatactgcacgcccggtgaatcgcaccagttcaacccgacctgcggcgacgaggcgaccatccatgtcgaagtctccgatgacgaaccgcacaccatcaagcgattggtgtgggacggccacggctgctccatttcgcaggccagcctgtcggtgatggtcgatctggtggacggcaaaaccgttgacgaggccatggatctggaacagacattccacaagctgatggaatcgcgcggtgccggtctggacgacgagaacctggaagaaaagctcggcgacgccgtggtattccaaggcgtgtcgaaataccctatgcgcatcaaatgcgctctgctaggctgggaagggctgaaggactccatcgccaaagccctcgctgcaaagaactgaggaaatatgtccaacgataatttggttcccgaaccacagccgtccgttttcgatgctgtcaacggcgtcctgcaggacgaggaggccgctcgccgcgtgatggccaacccggccttggccaagggcttcccgaacggacgcccgatcgagcactctgctgcgtccggcgatgacacctgtgcgtgtggcggtcaccacggcaaatgcggttgccaggatgacgaacagtccgatggcagcgagattccgatcaaggcgattgacgatatcggccgcgccactgccgaagacgtgcgcgaggcactgcatcaggtgattgatccggagcttggcatcgacgtgatcgatttgggtctggtctacggcattgagatcgatgagctaggccgcgccattattacgatgacgctgaccacgccggcctgcccgctgaccgaccttatcgaggacgaatgcgcatccacgctggccggtctggtcgaggagttccgcatcgactggacgtgggatccgcgctggaccatggagcgcatcacgcccgaaggccgcgaccagctcgccgccctaggcttcaacttcgacaacatgccaaagtactgatagcgcttagtaagctccctcatcagagggagctctatacgagaaaagccccgcatgatgcggggcttttccatgtctggactggtcaatcagtcatcgacgatggtgttcttcgggacaaccgtgatgccatccggcgtgacggtgaagccacgggccagatcgtgctcggtatcgatgccgacagtggagttctcggtgagcaccacgttcttgtcaagaatcgccttgtacacgcgggcgcggcggttgatgactacaccgtcgaacagcacggaatcgacaatctgtgcccacgagtggatacgcacattgggggagagcacggagtggtgcacttcaccgccggagacgatcacaccgggggagacgatcgaatcggtggcgtggcccagacggtcgcggccggcgtgcacgaacttggccggcggcaggttgccggacatcgtgtaaatcggccaatcctggttgtacaggttgaactcgggcacataggcgatcagatccatgtgcgcatcgtagaactgcttaatcgtaccgacgtcgcgccagtaagcgtgatcagtggccgtggaacccggaatctcgttcgagttgaagtcgtagacgccggcctcgttgcgggaagcgaagtacggggcgatgtcgccgcccatgtcgtgcttggtgtcggcagccttctcatcgagagccagagcctcgaacagggccttggtgttggcgacgtagttacccatggaagccagaatctggttcggattgtccggcagaccggtggtggtggccggcttctcctggaagttcttgatcatgttcgggtgatcgggatcgacctcaatcacaccgaactggttcgattcctcgatgggctggcggataccggccacggtgaactcggcgccggactcgatgtgctgctgtaccatctgctcgaagtccatgcggtagacgtgatcggcacccacgatcaccacgatgtccggctggacatcctcgatgatgttgatggtctggtagatggcgtcggcggagccgagataccaatgcttgccgagacgctgctgcgcgggcacaggggagacgtacgagccaagcagcggggagaaacgccagacctgggagatgtggcggtcaagcgagtgagacttgtactgggtgagcaccacgacctgacggtacccggagttcaccaggttgctcaacgggaaatcgatcagacgatacacaccaccgaagggaacggcgggcttcgcgcgatcacgggttaacggcatcaggcgggtcccctcaccacctgcaagcacaatcgacagaatcttgggattcttggtcatcgtaactgtcctctctgttactgagcgtctttcgacaccgcactgccgggccggatgcttccttgcattcggtttacatagttaataattgcagaaaaaaacgaacatgcaaggctttcgcccccgcgtgccgtgaacttgcgatgaacagtttcgtagatttgttaaggatccggccttttcggagcgcgtgcgattccttagcgtgtcgcgtagaacgccactgcgctggatgccgccacgttcaggctatccacgccgtggctcatcggaatcttcacggtcaaatcggcgcgggcaatcgtatggtgggacaggccgtcgccctcggtaccgaagatcagcgcgagcttgtcgatatgcgtcggatcttcggcaggcgcgtgcagacggcgtgtcagttcgtccaacgaaatcgaacgatcctccaatgccatggccacggtggtgaagcccagcgacttcaactcgtcgatgccctggaacggccagtaatgcttgttttcggtgccgtcgtcgttgaacccggtgatacgggtccacggaatctggaatacggtgcccatcgacacgcgggcggcgcgtcggtacagcggatcaccgcaggagggtgtgaccagcacggcatccacatcgagcgcggccgccgaacgcatcagtgcgcccacattggtgtggtccacgatgttttccattactgccacgcggcgggcgctcttgcagacctcggctacggagggcaacggccagcgtcgcatcgcgcatagggcgccgcgatgcaaacggtagccggtcagacgcttgagctgctcaggtgaggccacgtagacgggaatatccgcgccccagcgcccgtcgatgaagtcgaaggtgtctttcatgccctccagccaaggttcctcgaccagcagtgacagcggttcgcggtcagcggccagcgcgcggtcgataaccttgggggactcggcgatgaacacgcccttggctggttccaagcgattacgcaactgcatttcggtgaggctcacatacgcttcgacgcgcgggtcgtcgacggtgtccagcgtgatgaactgcattggtggcctttcgtgtgtgcagataacgaaaaaccccttgcaatgcaaggggtttatctgtgcccgagacgggacttgaacccgtacgcctgtataaaataggcactagcacctcaagctagcgcgtctaccattccgccacccgggcaggtgtcgtttggacaacgagtagatagcttagcatgaaattacagggatgcaattcgcgcgtgtgcccggcgtgtcgcgtgtagccttgaagtcatgactgatgccctttttcttttcgacccgcaggtcgacgacgtcccggtgaacagcgacgaactccacgccggctggaagctaaccctgcccgctcacatcaagcgccatgccgtgcaggccatgcgactcaaggcaggggacagcctgcaactttccgacggcaacggcttgagaatccaggcagtgatggccgatcctgaagccggactggctgaagtcgtggaagtggggcgcgaacccgagccgctcacccgtttggcgctgattcaggcattggcgaaaaccggccatgatgagcaggccatcgatatggctactcagattggcgtcgaccaagtggtgccatggcaggcggaccgatccattgccaagtggaaggtcggccgtacagacaagaagtggaattcggtactggatgccgccaccgagcagtcgcggcgcgcctttaagccgcaactggaggcgtgcgcgtccagcaaggaggtcgtggccatctgccgcagggcctgcgtgcatggcgatgtggtgattgtgctgcatcaggatgctaccgatacgtggtccggcgtggaggagaaggttgcgcagttggtggaacgcacgctccaggacggccggccgcggactgtcagtgtggtggtcgggcctgagggcggcatcagtgagcaggaggtagctgatttcgtcaaggccggagcggtgagctgcgtactggggcgcaatattctgagagccgcgacggccggtcctgtagcgttgtcgctgttgtctcgggtgttgggacgttacgagtaacgcccacgcgctaagctggtgcgtagcaacatcaaaccaaggagcatgatgagcgaatccgacgattgcctgttctgcaagatcatcgcagggcagattcccagcagcaaggtctacgaggacgagacgacctacgcattcaacgacatcaatcccaaggccaaggtccacgtgctcgtggtgcccaagaagcactacgccaacgtcgccgaacttgccgccggtgacccgaccgagctggcccacatcgtctccattgcgcagaacatcgccgacaaggaatttcacggcgcctaccgactggtgttcaacaccggtctcgacgccggccagaccgtcttccacgtgcacgcgcacgtgatgaccggcgaaaagctcgacgagtagtaggggaatatccgcttcgtggcaacgactacacgtaccatcaccatcccgccccaacttgaccccgtcgccgtgctcggcccggttgacgaggtcattcgcgaggtagagcgcgcctttccggacctgacgattatcgtgcgcggcaaccgcgtggcgatcgtctcccgctccaagcagaccgaagcccaggccgcacaggccgaggatttggtcaataccatcatccaagccgcctacaccgcgcctatggacgccgacaccgtgcgtcgcatgctcgaccagaacgtgctcaagaaccacgtgcgcctcgaacatcccggtcacggcccggtgcgtgacaaactggcgcaatcgacctcaaacgaacgcgcccatgcacgttctgccggctcccacgacccgacgtaccgcaagcccacggttcccggcgtcatcacctttgctgccggcgtgccggtccgtgcgaaaaccgccggacaagtggcctacgtgaacgccatcgaatcgcacaccatcaccttcggcattggccccgcaggcaccggcaagacgtatctggccgtggccaaggctgtgcgtgccttccaggacaagcagattcgccgcatcatcctcacgcgcccggccgtggaggccggcgaaagcctcggctttctgcccggcacgctgaatgacaaggttgacccgtatctgcgcccgctgtacgacgcgcttggcgacatgctcggcgccgaccagctcaagcggtacatggacgacggctccatcgaagtggcgccgctcgcctacatgcgcggccgtacgctgaacgacgcgttcgtgatcctcgacgaggctcagaacaccaccgaacagcagatgaagatgttcctgacccgtctgggcttcaacaccacgatggtcatcaccggcgatatctcgcaggtggacctgaccgtgcctcgctcgggactggccaccatcgaacgcatcctgggcggcatcaacgacatcgcattcgtgcatctcaaaaccgaggacgtggtacgtcaccagctggtcggacagatcgtggccgcctacgaccgtcactccgccatcgccggcgaccaccgcgacatcgaacgcaagggccgccgcaaccataccgacttcgatgcccgccagcaagcggattcaaccaaccaaagtgagacagacgatgagcgttgacgtcaccaatgaaacccagtgggtcatcgaccccaaggtcttctccgatttgggtatttgggtactcgaccagatgcgcgtgagcacccagtccgacctgaccatcatgttcgtggatcccgatcccatcgccgaactgcacatgcgttggatgaacctcgaaggcccgaccgacgtgatgagcttcccgatggacgagctgcgccccggcgacggcaaaaccgtgatggaaggagtgctcggcgacatcgtcatctgcccgtgggtcgccgcccaacaggctgccgcagccgggcacagcaccatgcaggagatgctattgctcaccattcacggcatcctgcacctgctcggctacgaccacgtgacccccgagcaggagcgccagatgttcggcctgcagcgacagctgctgctcaccttcttcgccctacgccacgatgtcaacgtgcaggccacgctgcccgccggcacgcccgacgcgctggccctgtacgacgccgtgcacggtgccggccgcgacctcgattccaaataagctcccaaatcaatcacaccaaatccggattattcgataccgttcaaggacattcaaggacaccgaaaaatcattatggagtattccagtaccacgccgatcgccatcaccgtcattcttgtactcgtggcggccctgttcgtctggctctcgctgaccatggccgccgctgaaggcgccgtggcccgcgtaacgcgagccagccttaacaatctcatcctcgaggtgcagaccgactccgaagcaagccagttcctcaagatgaagaagatcgacaagattcatcgcgtgcaacggctcatcgccgaccgttacgccaccgccggcagctgtgcgttcttccgcatcgcctgcaatgtgctcgacggcgtactggtgtcttccatcgcatccctgtggggtgcggaactgtggattgaactgctctccggattcctgttcgcgattatcgtagccgtggtctccgtactggtccgcccgcgcaccgccggcatggccaagccggtcggcatcatgatttccaactcgcgcatcgtgtcgttggccaccaagctcacgccgttcgcacgcatcggtggcgacaagtccggttccaagggaccgggccgccgctccaaggactccgatctgtccgacgacgaggagcttgagaagattcagctcgagcagggcaaggccgccatcgaccgactggtggagtccaacgacttcgatccggaagtctccgaaatgttgcgcaacgtgctcaccctgtctgatacgttgactcgcgagatcatggtgccgcgcaccgatatgatctgcatggagcgcgactccacactgtcttccgcgctgaaactgttctcccgctccggcttctcccgcgtgccggtgatcggtgaggatgtggatgacctgatcggcgtggcctatttgaaggatgccgtgcgtgccaccgccttcaacccggcggccatggagcgcgcggtcgaatccatcgtccggcagccgctgcttgttcccgaatccaagccggtggacgacctgttccatgagatgcagcgttcccgccagcatgtggccgtggtggtcgatgagtacggcggcatcgccggcatggtgactatcgaggatgccatcgaacagatcgtcggcgagctggaagacgagcacgaccgcacccagcgtactgagccggagaaaatcggagacaacaagtggaagatgcccgcccgtacgccgattgccgatctggaggagatcttcgagatcgacattgatgaggacgatgtcgataccgtgtacggcctgctgaccaagattctgggccgagtgccgattgtcggtgcctcggctgtgacgcgcggtctgcgactgaccgccgtggactccgccggacgccgcaagaaggtgtccaccatcgtcgtagaaccggcgcacgtcgagggcggcgaggaaaataacaagacccatgaggaaactgacggcgagcccgtcgaaggcgatgataccgccagcaaggagtgatatgaccgatcagaacaacagcacgaacgacgtcgatgacattgacgttaccgatgcttccgatgttgccggcgttgccgaagtcgacgcgaccggtgaaacggcgaacgtgaccaagcaggacgtgccgtatcgctccggattcgtggccgtggtcggccgcccgaacgtcggcaaatccacgttgatcaacgcgttgatcggcaagcagatcgccatcgcatcctctcgcccggaaaccacccgtaaggcgatccgcggcatcctgaccgccgaccacgcgcagctcgtgctcgtggacacgcccggtattcaccgtccgcgtacgttgctcggccagcgtctgaacgacgtggtcgacgaatctctggccgatgtggacgtggtggccttcctgctgcccgccgatcaggaaatcggccccggcgacaagcgtattctctcccgactgcgtaccgacttcgccaccaagcgtgaggacggtacgttcaagtggcgcatcccgctgattgccatcgtcaccaagatcgacgagcttggccgtcagcaactcatcaacaagctcatcgaaatcaacgatttcgccgatttctcggacatcgtgccggtgagcgctctgaagcacgacaatctggctgaagtgaagaacgtgctcattgagcacacgcccgagggtccgcagatgtacccggacgatcagatcagcgaggagcgtccggaagacaccatcgccgaactcgtgcgcggtgcgttccttgagaccctggacgacgagctgccgcattcgctggccgtggtggttgattccatcgactatccggaagacaacgagaccggtcagggctatgacggcaaggcgcaggtcaacgtgtccatttacgtggagcgtgactcccagaagccgatcatcatcggcaagggcgcctcgaacctcacctacgtcaagaagaagctgcgcaccccggtcaaccgcatcgtcggccaaaaagccaagctcgacctccacgtcaaggtagccaaaggctggcagtccgaccccaagcagctggagcgcctgggcttctaaggcgtatagacgaaaaaagctccctcgtcagagggagcttttgctatacggtttacttccgcttcgtgtacatctgggtgttgaggagggtggagtagcgcttgatgaccttgggacgaatcaccttcatggaagcggtcatcaggccgttttcctgagtgaactcctcgggcaggatgatgaacttgcgcacggactcggcgcgggagacgccctcgttggcctgatcgacccacttctgcacttcggcgcgcacggcggcgttcttggcggcatcctccagcggcatgttctcgtccaggcccttggcggccagccacgggcgcagcgactcctcgtccagcgtcaccaatgcggagatgaacgggcgcttatcacccagcaccagcgcctgggagacgaactcgcaacgctgaatgacttcctcgatcgggccgggggagacgttcttaccacctgcagtgataatcagatccttcttacgaccggtgatgtacaggaagccatcgttgtcgatacggcccaagtcgccggtgacataccagccatcttcggtgaacgacagctcagtggcctcgtcgttcttgtgatagcgcgggaacacggcacgacccttgacctgaatttcgccgtcctcggcgatgcgcagggagaatccggggaatgcgatgcccacggaaccagcgtggaacggcgtacccagcgggttgaacgcgcacggtgcggtggtctcggtcagaccatagccctcgtatacaggcacacccgcgccacggaagaaagccagcagttccgggtcaagcggggcaccgccggccacaatccacttggcgcgaccgccgagcacttcgcgcagcgaagagtagacaatcggatcgaaggcggcgcggcgggtgcgggtcagtgcacctgccttgccattggcggagacttccttcatatagttctgcgcagccaccacggcggaggcgaacaccacgccctttggaccgtgtccggccttctgagatgcggcgttgtacaccttctccagcacacgcggcaccacgatcatgatggacggcctggccacctgcaggtcgctgatcagcgtcttgatgccggctgcgatatagatgtgcacgttcgaggccacgacgatgtagttgatggcgcgggcgaaggaatgggcctgcggcaggaacaacaggatggtgtttttcttgtcgtgcagcagttcgggcatgtaggtcggcagattcagcgcggtctggcagtagtgctcatgggtcatttccacgcccttcggcgcggccgtggaaccggaggtgtacacgatggagcacagatcggtcttcttgaccgagtcgatgcgctcgtccagttcttcgtccgagatgccggcgccataggccttgatttcgtccaagccaccggtctcgatggtgatgatgtgctccaaagacgggcattcctcgacggatccatccgccttctcgcgcatgtccgtatcctgcacgatcagcaggcgggcgtcggaattattgacgatgttgcgaatctgctcggccgaatcggtgtcgtagacggtggccagcacaccgccgcaggccatgatcgccgcgtcggtcaggtcccagtcgtaggaagtgcggcacatgaatgccacggcatcgcccttcttcaggccgtaatgaatcaggcccttggccacggcacgcacgtcagccaggaactcgttggcggtgacggtcacccaatcgttgccggacttgtaggtgtacagaggctcatcgcccatacgttcggcgcggtccgcatacaggtcgtagatggacgtaccttcgtccagcggcggattgccttcggtggaggtggtgagcaggccggtgacggggtcgatgtcggtgacggtcaggtggccgtcgtcccaatcgtcgctgtgaggcaaagcgatattggcctcgaccggcacgtcggcgttagacaggtaatcgggctcgtccggagtgtcgtcgtggaccgggtggacgaagtcggatcccaacctgagcgccttacgggtgagattgatagtgtgctgcgtgaaggaattgataaccgacaagtcttgctcctgtaaacctttcagtgtcgtccagccatgaggcgaacgcttctcaaagttcaaattgtaatcgcccaaaccgaactcgtcaccttacgcaaccgtaggattctggctggttaggggagtgcgtggcaaaatattgcacaggtcccgatattgttgagtaaccgtgagctgcgaaacggtgattgtcgataattattgagcggttggttgctaatcgatgccaggtgattgttggacggcttccgagcaattcatccgcaatgcacatggacacattcgtatttctcactaatttcgggttcgtttctgtttcgattggcggaatctcaagtcatggtctttaccttccggctacacttactatgcggataaccatgtccattttgaagcagaacaagaaagggctctcatggcgcaaaacccagaagccaccgtggtgttcggcgttttgaacgaaacgtccgaaacggaatcccgcgtcgcgctgacgccggatatcgtcacccggctgaagaggagcggtgtctcctcactgattgaagcaggtgccggcattgctgccgactacaccgatgaggattacgaaaaggccggtgcgaaggtgaccagccgtgacgaggtgctcgccgaagccgacgcgctcggttttgtggaccgaccgtccgccgagaccgtggccaagctcaaggccggccagtgggtcattggcatgctcggttccttcaccgatgccgattacgtggccgcgctcgagaaggccggtctggtgggcatcgccatcgaaaagctgccccgtaagctttccagcgcccagtccatggatgagatgacctctcagaactccgtgatgggctacaaggcagccatcaccgccgccgatgcttacggttccttcctgccgatgatgaccaccgccgccggcacgattcgcccggctaaggcgctggtgctcggtgccggcatcgccggcctgcaggccatcggtacgctgaagcgtcttggcgcggtcgtcaccgcgtacgacgtgcgtcccgcctcccagggcgaggtcgagtccctcggcgcgaagttccttgatctgggacttgacttctccaagggccagggcgagggcggttatgcccgcgcgctgagcgccgaagagcaggctcagcagcaggctgccgtcgacgaaaaggccgccggctttgacatcatcatcaccaccgccaaggtcccgggccgtaagcccccggtgctgctcaccgcagccggcgtcaagggtctcaagcgtggtgccgtgatcgtggactgcgcagcatccgacctcggcggcaacgtcgaaggctccgccgttggtgagcaggtcaccgagggcggtgtcaagctgatcggcgctccctacctggcctccggcgtcgccaccaccgcatccaacctgctttcgcgcaatgtggccgacatcctcgtgcacttcgtgcgtgacggcaagctcggccaggatctcaccgaagaactcgacgacgcgctggtggttgccggccgcgccgccgccccggcagctgctgccgatgccgagaagtccgagaagtaaggaagaaggaataccatgcctactctcgtcgtttccattaccctgttcgtcctcgcgctgctcatcggcatcgaggtcatcggcaaggtgcccgccaccctgcacacgccgcttatgtccggcgcgaactccatccacggcatcgtcatcgtcggcgttgtgatcgtggcagccgaagccaatagcccgctggcctacgtgttcatcttcctggccgctgtgctgggcaccatgaacgtcgttggtggctacgtggtcaccgaccgcatgcttgagatgttcaagtccagcaagaacgagaagaagggggagtcgaagtaatgacctccgcaaccgttggcgccatcgacatcgtcgcttggttcgtctacctgttctctgccgtcctgtttgtggtcggtctgcatttcatgaattcgccgaagaccgcccgcaagggtaaccagatctccgcgttcggcatggtcgtggccgtgctcatggcgttcatcgtgctcttcgccaagggcttcgtgaacattgtcgccgtggtggtgctggtcgtcggcatcctgatcggtgccgtggccggtgtcgtctccgccaagaaggtgaagatgaccgatatgccgcagctggtctccgtgttcaataccgtgggtggtggcgccgccgcactcgtggccctgaacgacatcctgaccaaggaaggcaccccggacatcgtggtgctcatcaccgctggtctcggtattctcatcggttctgtgaccttcaccggctcgctcatcgctgccggcaagctgcagggtatcaagtgggtcaagaagctgaacctgccgggcaagggcgtatggaacattctgttcgccgtgctgtctgtcgcctcgctggttatgctgtgcgtccagcccgaacagcgcctgctgtggtcgattctgaccaccgtgttcgccctgtgctacggcctggtgttcgtgattccgatcggcggcgctgatatgccagtggtgatctccgtgctcaacgcatgcaccggtactgctgtggccatgtccggtctggcgattgacaacgttgccctgatcgtggccggcgcactcgtcggttccgcaggtgtgaccctgtccatcctcatggctcaggccatgaaccgcccgctgctctccgtcttggccggtggcttcggcggtggtgctgacgccgccgctgctggcgacggtccggaaggcaccatgaaggagaccacgccggacgatctggccgttcagctcgtctacgcgcagaaggtcatcttcgtgcccggcttcggtctggctcaggctcaggcccagcgcgagctcgccgacctcggcgaactgctcaagggccacggcgtggaagtctcctacgccattcacccggtcgcaggccgtatgcctggccacatgaacgtgctgctggccgaggccaacgtgccctacgaggagctcgtggatctcgatgagatcaacccgcagttcccgcaggccaacgtggctctggtcgtcggcgccaacgatgtgaccaacccggctgctcgccgtcccggcaccccggtttccggtatgccgattctcgacgtcgacaagtcccagaacgtcgtggtcatgaagcgtggccgtggtatgggctatgccggcattcagaacgagctctacttcgaggacaacacccagatgctgttcggtgacgcgaagaagagtctgcagtccgtcatcgccgccgtcaaggaactcctcgcgtaaccattcttggctcccctcacagaggggagccaagctctatatctactacagcccaaacacccgcttaacaaagctgttaacgcgacgccaatagcggtccggatcggtgctggcgctcatcgtgtggtcggcgccgggaatcagcagcttctcgcggtcgatgctggcgcaggcgttgtaattgatgtccagatacttcgggttgacaaaagtatccgctccgccatgaatgaacatcatcggaatagtcgcgtgccgtaatgccttcacacaggaggcgtcctcaaaccggtatccagccttgcgtttagacacatgactggccactttgaccagcagcgcggccaacgagtgcggcaaacggaacatctcctcggcattatccgtaaactgcgagaccacggaactgtatccgcaatcggaaatcgcggcgacgacgttgcgggggagtcgcgcatcgccggccgccatcatcaccgtggcggcgcccatcgaattgccatgcaacagaatgcgtgcatccggatcagctgcggtgatcagcgaaacccagcccaacagatcgtcgctttccagcaatcccatacccacgtaacgcccttcgctcaactcatgggcgcgctgcgcgggtagcaggaccgtaaaaccgagttgcgcatagcgatgcgcccatttggccatttccgcgggctctccggcatagccatggcagcagatcgcgtatagatgcggctgtgggtcggaacaatccgggtccaacagccagccgtggagtttcaatccatcatggctgcgcagcgtgaccgattgcttggcctcctcgaaccaccgggcggcctcaagctgctcggacatgtcgaattcgatgcctttcggtgtctcctcgtgcggcatgttgaacatcgaacgtttggccttggtgtccagcgcgaacgtgaacatgacgttggcggccgcggctgtgacgccggctcctgtggcggctatcgcggcaagtgccgcagccatacccctgacaacgcgagtgtgtgcggcgatgacgtcatggccatcctcattgatgacgtcgtccgaacgagtcatatcaacctcccgatacggtactcaccatcgtacgttattttcgaaatcatccccaacttcgtgaaagaccgtacactgagtgtcgctgagcgtacgattttcacgaaatggcggacgatttcgtgaaaaccgtacgttgagaacgggtaagcgtacgttcttcacaaagttagggattatttcgcggaaaccgtacgttgacgtggctgggacggccgggatgcagtgtcattgaagcatcaccacgccaaagtccggagttagcgtatacttgacaattgttgctttggcgagggaagtgtgcgtgctgacacatgacacagcttccgttatcgactcggcgtatttcactccttgtagggtgtctttcggcgcgtcgtggcgtctgagcgagacagaacgaaacgaaactacaaggagtatccattatggctaccaccattaagcttgagggcgaggcccgttccgagttcggcaagggcgttgctcgtcgtctgcgcgttgccaacaagattccggccaccatctacgccggcggcgaagagcccgccttcgtgaccttgccgatgcgcgagaccaccctggccctgcgtcacaccaacgccctgttcaccatcgccttcgacggcaacaccaagatggccgtcgtcaaggacgtgcagaagaacccggtcaagcgcatcatcgagcacgttgacttccttgaggtcaaggccggcgagaagatcgacgtcgaggtgccggtcttcgttgaaggcaccccgaagggcgctgctgtggcattcgtcgacattcaggagctcaaggttcgcgctgacgtcgccaacttgcctgagaagatcgttgtgagcgtcgagggcctaaccgacggcaccaaggtgttcgctaaggacgttgttctgcctgaaggcgttgagctcgacgttgaggacccggaagagtccgtcgtcaccgttgaggtgccggaagatgcttctgagtccaccgtcgctccggaagctgctgctccggctgccgacgctgctgctccggctgccgacgccaagtgagtcggtcgcttcgatagcgaacaattcagaacataactgaaacgtggaagcccgcagccgttgagaacggtgcgggcttcttcgttttttcaccatgtgaactctgccacacgagtaacacatgggtgtgcaaaagtatgcaacagagctcgcgccacaagcgcacagcacacaccccatatggtggctttcgggccgccaaagtcaagaagaagtagctagtgatgactgaaaacacgcaccacgatccggcagcgctcgacaagctcgccgaaccgttcaccgtactgccgaacgacaaccccgcatccgatgagaagcgccagtccctcatcgacaagccggctttcggccaggtgttctccgacaacatgacccacatgacctggaccaagggcgaaggttggtccgaccgccgcgtcgaaccgtacgcaccgctcaagatggatccgggtgcttccgtgctgcactacgcacaggagtgcttcgagggcctcaaggcttaccgtcatgccgacggctccacctggctgttccgcccggatgcgaacgccgagcgtttccagaactccgccaagcgtctgtacctgcctgagctgccgattgacgacttcctcggttccgtggccgcgctggtcaagcgcgacgccaactgggtgccgtcccgccgcgagtacacgctgtacatgcgtccgttcatgttcgcttccgagccgttcctcggcgtgcgcgccccgcaggaggtcgactactgcgtgatcgcctccccgtccggcccgtacttcccgggcggcgtcaagccggtgagcatctgggttgaagacaagtggttccgcaccggccctggcggcactggtttcgccaagtgcggcggcaactacgccgcctccctgctcggcgagtacaagggtgttgagaatggctgcgagcaggtgtgcttcgtggacgccgccaccaagacctacctcgaagagctcggtggcatgaacatgatggccgtgcacaaggatggccacgtggagaccccgtccctgaccggtaacattctgccgggtgtgacccgtcgctccctgattcagctgctgcaggacaagggccacgacgtggtcgagaccatgattgccctcgaccagctgctcgaggacatcaagtccggcgaagtcaccgaggtgttcgcttgcggtaccgccgccatcatcaccccgatcggtcgcttcaagtccgagaagttcgatgtcaccgtcgccgacggcggctccggcaagctcacctgcgaactgcgcgacgagctgctcggcatccagctcggcgaagtcgaggacccgcacaactggatgtggaaggtgtgctgaactagcaccttttgtttctgactaagaccccttggaacagcaacaattccaaggggtcttggcgtattggaaatgttcttggctagagagatacagatggatttagcaacattccgcaacaaataatatgatctaggtcttctgcacgttgcggggggtggttatggttcatccagatgagaacaggagcaaacctatgagcaagatgagtgacatgacggaataccatgcttcagcctaccgtttgccgtcaggcttcgaacactgctcgaaattgaagccggtggctgaggcagcgacggcgctggaccgggtcaaggccgtggtggatgtgctgtattcgccgggcggctgcccgtgggacggcaagcagacgaacaagtcgctgctcaagaatctgctcgaggaaacctacgaatacgtcgacgcggtggagactcacgaccgtgacaacatgcgcgaggaactgggtgatgtgttgctgcaatccgtgtttcaggcgcgggtctgcgaatcggatactgaggacccgttcggtattgatgaggtcgccgatcggttggtgaacaagctcatcactcggcatccgcatgtgtttgcggctgatgatgccggcaattcctctgattcttctgatgcttttgatgctgacagtaacgacgggggagaagctgcccaacccgaatccccggaagccgtgctggctctatgggaaaagatgaaacagcaggaaaagcatcgtaaatccgtgcttgagggcatttcccgtgctcaaggtgcgttgcctcgcgcggccaaagtcgtttctcgtatctccaaatcgccgaatgctgatagattgttcgcggcgtttgatgagccggctgcggctgatgctcagcgagatgatgtacatcctcaagcggcgaaccaatccgaatcaagcggcgacaattccgctgaacgggagaaggccgatgcctacgccgatgaaatcctcgccgtcgtgcgcaaggcccgcgttgacggcatcgatatcgagtccgcactgcgcaatcgcttgcgtgatgtcgaagaaaaagtcgccttgattgaatcagaaatcaacaacgattaagtccatacatgttttttgatcacggatcgtaaaacttagaggtgctgagttgccaacgactaccggcaagctggcgtcattgccatcctattcacgtcttagtggccccttcctccccggccatactactcaggcaaggcctgttgtaggctcgggtacgacgggctgtagcgccgaataaggatgaacgggaacagaacgaagacggactgagacgaaccgaagcggtaccagaggggagtggctcatgcaggtggcgttggagaacaacatcgtttttgtggtcatcgagtatttagcaatcctgtgttggggattatcgggcggacttgccgccattcgcaagggctacgacatcttcaccatcatgctgtgcggatggcttaccgcactcggcggcggtcttgtgcgcgacgtgatgctcggtgccctgccgccggtcggcatcaccgacaaaggctatgtgctcaccacgctgttttccggcattatcgtggtggtggcccatccggagatcaccaaactcaaatggacgatgactgtcatcgatgctctgggcctcggactattcgcagtcagcggcaccgcaaaagctctggcctacggttcctcaggcatgacagccgtattccttggcatgttcacagcactggccggcggcctcattcgtgacatcttcattggcgacgtgccaatgattattcgagacaaacacctctatgctgtgccttcgttcatcggctgcatcctgaccgtgctggtatggcgcggcgtaagctacggctggttcgacatgcgctcggaaatgctgctcgacgtgctgatcgtcatcatcgtggtggcgctgcgactgctctcggtaggcttcaacgtcactctgcccggagccgtcgaacgtcatcgcgtctacctgcccagcgaaagccgatatctcaagcgcccggtcatccatccgcacgccgataccgtcgatcccggcgataccaccaaggacgaagaagacaagcctcaggatggttcaaggccgcctcagggctaactgtcttcaaagaggtacatctggccttctgcagaatgctaactgctttcaaagaggtacctgaagcacgaaacgctgagtataagtgttgcaatgatggcgtttatagttggtttttcccgtattcggtacctctctgaacggagatgtcatttcgcaagaccgccaatgtacctctttgaacggagatacaaaaagtcccgcaagccagatgacttgcgggactttctaaaaccttaagaggcttatgctcacagagcgttgatcgcaacagcgaggccggacttgcggttggcggcctggttcttgtggatcacgccagcgccagcagccttgtcgagcttctgggcggcaaccttgtaggcggcctcggcggcagccttgtcaccggcggcgatggcttcgcgggtggcgcggatggcggtcttcaggccggacttcacagccacgttgcgaaggtgcgccttctcattggtgagcacgcgcttcttctgcgacttaatgtttgccacgtttactccaaacgatgtgtgttataaggacatacaaaagttagaggatagcatgagccccggaaaaacccgcgcaatgccacgccgaatacagtccctcggctacactaggtgaagtttgagtatatgccaagaggaggaatgcgttggtcgtccaacacaatcagccgggttccacggatcagtcggtgattcgcaacttctgtatcatcgcacacatcgaccacggcaagtcgaccgtggccgaccgcatcttgcagttgagcggcattgtgcccgagcgagagatgcgcgatcgcttcctcgaccgtatggatatcgagcaggagcgtggcatcaccatcaaatcccaggccgtgcgcgtgccgtggacctttgacggcaccgaatacacgctcggtatgatcgacacccccggccacgtggacttcacctatgaggtgtcccgcgcactggccgcctgcgaaggcgcggtgctgctcgtcgacgccacccagggcatcgaggcgcagaccctgtccaatctgtatatggccatcgaccatgatctggccatcatccccgtgctcaacaaaatcgacctgccgtccgcagaaccggacaagcatgccgaggagatcgcaggtctgatcggctgcgagccgagcgacgtgctgcgcgtctccggcaaaaccggcgaaggcgtggccgacctgctcgaccagatcgtcatggacgtgcccgccccgcacggcgaccccgatgcccccgcccgcgcgctgatcttcgattccgtctacgactcctaccgcggcatcgtcacctacatccgtatggaggacggcgaactgcacgaccgcgaaaaggtccacatgatgggcattggcatgacccacgatcccattgaaatcggcgtgatcagccccgatatgacccgcaccaaggcactcggtgccggcgaggtcggctacatcatcaccggtgcgaaagatgtgagtcagtccaaggtgggcgacaccctgacttcggccgtccgcccggccgccgagccgttgcccggctatcgcgacccgaagccgatggtctacgccggtttgttcccgatcgacaacgcccagttccccgaactgcgtgatgcactcgacaagctcaagctcaacgacgccgccctgatctacacgccggaaacctccgtggccctaggcttcggcttccgctgcggcttcctgggtctgctgcacatggaaatcgtcaacgagcgactctcccgcgagttcggcctcgacctgatccagaccgccccgaacgtcacctacgacgtgaccgccgaggacggcagccagcatcatgtgaccaacccgagcgaattcccggacggcaaaatcaagaagattgtcgagccgatggttgccgccgacatcatcacgcccaaggaattcatcggtgcggtgatggatctgtgccaggaccaccgtggcattatgggcacgatggagtacatctccaccgatcgtgtcgagatgcactaccgcattccgctggcggaaatcgtgttcgacttcttcgaccagctcaagtcccgcaccaagggctacgcttcccttgattaccatgaggatggcgagcagtccgccgatttggtcaaggtggacatccttattcagggcgagaaggtcgatgcgttcagtgccatcgttcaccgcgataaggcgtattcgtacggtgtgatgatgaccaagaaactgcgtagtctgattccgcgtcagcagttcgagattccgattcaggctgcgattggttcgcgcatcattgcacgtgagaacattcgtgcgttacgcaaggacgtgctcgccaagtgctacggcggcgacatcacccgtaagcgcaagttgctcgaaaagcagaaggctggcaagaagcgcatgaagatgctcggccatgtggaggtgccgcaggaggcgttcatcgcagccctgtccaccggcgaggactccaacgaccgcgacaccaaagacaagatccgcgccgctcagaagaccgagggctagtgttcgaggtctacatccacgtcccgttctgcttgcggcgctgcggttactgcgacttcaacacctacacggctacggatcttggtgcgggggcctcgcgcggcaactatgccaatatggtcattcgggaaatgaaattgaccaagcagtggcagctcgaccacggcatcgaggagccgccggtttccaccgtgttcttcggcggcggcacccccacaattctcgccgcccgcgatctggtcgccatgctcgatgccgtccgcaagatctggagcatcgcgcccgacgcggaaatcactaccgaagccaatccggacacggtcaacgagtattacatcaatgagctcgctgccggcggcttcacccgtgtttccttcggcatgcaatctgccgtgccgcacgtgctcaaaaccctcgaccgcacgcatacgccggccaacgtggccgtaggcgtcaatgcggcgaacaaggctgggctgcgctccagcgtggatctgatttacggcgctccgggggagagccttgacgattggcgcacctcggtcacgaccgccatcgatcttggcgtaaaccacatctccgcctacgcattgaccgtggaacccaccacgaaaatgggccgtcaaatcgcggccggcactctgcccaagcccaatgacgatgacgaggccgctaaatacgagatcgctgacgacctgttcgccgccgccggcctcgaatggtatgaggtctccaactgggctcgccccggatacgaaagccagcacaacctcggctactggcgcaacgttgattgggccggtctagggccaggtgcccactcccactacaacgcggtgaccgaggctgaccacccccagtcggcttcgctgacagcccccgctggcgggagcaagtccgaagccattgcctctgcctcagctgatggacaggccaacgccgaactaggtatgatcaacgcgcatgggaacaactcccaagaaattcatgcccccgctggcgggggttgtccggcggatgccggactgggggtggtttctgtctcacacggtctgcgcagctgggacatcgcgcacccgcgtttgtggggcacggccatcaacgagaaccgtgtgccgtgggccgatagcgagacgatcactcccgaggaaaacctcgaagagctcatcatgctcgggctgcgcctgcacgagggccttgacctcgaccgcatcaaccgcgccatcaacgatgcgggtatgagcagcacgccccagactctccgtaatgtttcccttgaccaactcgccccaatggtcagcgaaggcctgattaccgtatccgataatcatcgagtggtgcccactcgtcgtggccggttgctcaatgactcggtaatcgaacagttcttcgatttcgtcggtgtatgagtcggtggtatggtgcgcggcagtcgccattacctgttcgctagttgtggttacaccgtcagagggagctatttttgttttaccggcgggggagggaaccgcgtaggactacgtccggggcgctttgcacgtagatcaggcggttggcagtgccgccggtggcctccccgtcatcgcggttggacaggatgctgtccacggcggcctggcccatttcggccagcggcagatgcacggtggtcagtggcggaaacacgtcggcggagtaggggatgtcgccgaaaccggtgacgccgatttcccgacccggctcgatgccgttggcgcgcaacgcggtcatcgcaccgatggccatcacgtcgttgagcgcgatgattgaatcgatgcctttgccgtcgtacagtgcgccttcgcccggcttcagcagtccggatcgggccatttgcatgacggccgcatagccgtcggtacggctgaacttaccattcgccacggctttcggatccacggtgatgcctgcctcgtccaacacttccatcacgccggccagtcgttctttggaggagcgatgtgcgtcatcgcccttgagaatcgcagggcgcgtatacccggaatcgacgatcagctttgcgatggcgcgcgcgccgacatcgttcgccatgtccacggccgggaagggcaggttgcggttgagcacgaacacggcacgtccgccggatgcttcgtactgggtgagttccgtctgcaacgcctggcgttccggcgcgtcggtgtattcactttcggagatgatgatgccgcgcggcctggtggatacggacttacgcaccgcctccaactcttcgtgcggggtggctgccacgccgatggtcacggaaatgccgcgttcggccgccgccttgaccacgccttgcgatacggatgcgaagtagggatcggagatatcggagaccagcagcacgatgttcggtgcggtgcctttggccactgcctgagcataggcgttgggacgatagttgagcttggtggctgcttccatcaccttgacatacgattggttgcgtaccttgcgggtgctgccgttgagcacgcgggatgcggtggcgatggagacttgggcttctttggcgacatccatcaatgtcgctggcgattgcgccttatcgttctgtacagccacgatcgaatcgatccttttcttccctgaaacggaaaacgtgtctaaacgtttaccgcaacgatatcgcatttttgcttgcaatagtagcacccgatgtctatttagaagtgcaacacccttgttggtcctgtaattctaacagttcgtcggcgaacgcctcggcgggcgtgcggtagccgagcacgcgcatggggcggttgttgatctcgtcgacgatctccctgacctcctttgccatgtccatccggatctcgcagcgtttgggcagataccggcggatcatgccgttgcggttctcgttgcttccccgctgccagctggagtacgggtcggcgaagtacgtggccatgcccagcccgtcgcgcagcctttcgtggtgggcgaactcggtgccgttgtcgtgcgtgacgctgacgcgcgcgccggccggcagcggcgagaacatgtccagctgcgccccgacgctctcgccggcggtcttgtccggaacgatgcgggccatgaggaacctggtccttctctccacctcggtgtgcaggttgcatcccactccgatgacgctgtcggcctcccaatggccgaacgcgctcctgccgtcggcctccggcgggcgttcggagatgggcactcggccggggatcgggaagcgcgacgtcctcctgccgccgtgcctgcggcgccgcctgtgccctcgcggcaggcaccgcgcccagcgttcccgaagcggcctgctggagtagacccatcggtagatggtctccgggcacacgcgcatgagcgcatcgtccggccacaggacgcgcagcctgccgctgatgagcagcggcgaccagccgcggcccagccattcggccacctgcgcccacaggcggtcgtgcgacagccggtagggctttcgtggcttggatctcctgcggtcggccttgcgctgcgcgggcccggcgatgtagtagcggccggtccatggccccgccttcagtcttttcggccggtacgggcggtacgactcgttctcgttggacgggaaccatgtgttgcgcttgatctcccggctgatgctggacgggctgcggcccagcatcgcgccgatcccgcgtatgctggcgccgttgcctacctcgatctggatgacctggcgttcctcttccgacaggtgcgaatatacttctcccataggtgcgacatcccttcggactggttttctaggcaatttccaatctaacgggtgttgcactttcatttagacaacggggcattgtggattggaaagcctgaattctgaacaaaaaaataatcacgcgaattacggaaaacgtttaccgtttcgtcgtgtcgtgcggtatgctcgaagcatgacgcgatacttatgcgcccctgactccttcaaagagagcctgaccgccatggaggcggcccgggcgatggctcaggggattgagaatgccgaccacgatgccgaggtccgttgccttcccatggccgacggcggtgaaggcaccgcacgcgcgcttgtcgacgccaccggcggatcgatgcgcgccgtgccggtccacgacccgctcggccggcctgtcgaaggccacttcggtctgctcgccgacggcacgaccgccgtggtcgagacagccgaagccagcggactggcactgcttgaagccaaagaacgcaacccgttgatcgcctcctcctacggcaccggcgaactcatgctcgccgccgtccgttccggagccaagcgcatcatcgtcgggctcggcggcagcgccaccaacgacgccggtgccggacttctgcaggccctcggcgttcgtcttctggacaagaacggtaacgacttggcacacgggggagcggccctcgccaatctgaccaccatcgatatcagcacgatggacccggctctcaagaacgtcgccatcaccgccgcctgcgacgtgaccaacccgctgaccggccccaccggcgccagcgccgtgttcggcccgcagaaaggtgcgtccaaagatgatgtcgccacattggacgccgccctcgcgcattttgcgcaggtaatcgacagccagctcggcgttgccgtgaacgacgtgccgggtgccggcgcggccggtggcatcggtgcagcgctgaagggcttcctaaacgccgaattccgcccgggcatcgccatcgtcatcgaacaatccggactcgatgcggccgcgcaatgggctgacgtggtgttcaccggcgaaggctccatcgacttccagaccaagttcggcaagacgccggccggcgtggccgaaaccgccaagcgccacggcaagccggtcatcgcagtagccgggcatattggcaccggcatcgatgagctgcatgaggtcggcatcgacgcggtattcggcatcgcgcccggagccgccagccttagtgagctgttggccgatgcggccgccaacgtgacccgcaccaccgaacaaatcgtacgaaccctacaactgtgagcaggctcccgctggcgggggctggcgggcttcgcccgactggggggcagcgctgagaaccaccctcagtctcgctatgcgagacagctcccgcagcgggagcgagtaccggaaaggaagacgtgcgcgccacactggaaaccgtgagctgcggcgaactgaccgccgtgtatcgcaaagatagcgacaccggcatcgtggaactggtatcatggatcgtcggcgcgagctcggtcttgtgacatgattggtggtgatggaatcaacgatgagtccaacaaaacggcaccgcctcccattgcgcaatatcgcgcgcaatattacgcagcgtattggctctccgaatgcgtgtctgctaaacctcgtgttgctctatcagcgagctttccgactgcgcagctcaggcaacatcacgacgaacaggatgaccgccacaatcgcggtcagcagatcggcgatggcctgcgcggcgattacaccctgatagccggccagccgggagccgacgaacagggtaatcgccagcatcacaccctgcctgctgatcgacagcacaaaggcgccgaccgccttgcctgcggactggaaggtgcaggtcgtgaccatcacgacggctacgcacaccaggctcagcagctgaacccgcagcatgccggcgcccagcgtgatgatggtggcgtcctcgatgaagaatcccatcagtagacggtcggacaggctgagcaccacggtcatcaccagggcgaacagggacaggaacaggtaggaaaaacgcagaatgccgcgcagtcgaggcatattgcgggcgccgtagttgtagccgatcagcggctgcgcgccgaacgcgaatcccacgaaaaccagcaccgcgatcatgatgactttcagcgcgatgcccatcgcggctaccgcgtcggtaccgtaggggagcaggaacaggttgatcatgacgatgccgacgctctgcgtgaggttcgtgatcgccgaggggatgccgatggcgaggatgctcccgacctcccgggccgtgaccgccagacgccggcgcgcgcggtcgatgacggtccgcgggtcgatggacaggttgctgctgtgacgcagcgtgaaccagacgaaataggcgtcggtgcagatgttggcgatcacggtggcaccggccgaacccgcagcaccccagccgaatccgtggatgaacaggggattgagcacgatgttgaccgccgtgccggccaccgaaccgatcatggactgcacggcgtggccttcggtgcgcagcaggttggacggcgtcatcgacacgatgatgaacggcgagccgacgatgatcagcgtgtagaagtcggaggcatactgccaagtgtcgtcagtggcgccgagcagcgcgagcatcgggtcgcggaacgccaggcccagcaccagaatcagcaggccggtggcgatggcggcatagaagcagaacgcgctgagtcgcttgccgtcggcgaaccggtgttggccgaacaagcgcgagatgaccgaactgccgccgaggccgaagatgtcgccgagggcgatcatcacggtgaacactggcgcggtgagggagacgcccgccaccatatcggtgtttcccgtatgcgcgatgaaataggtgtcgaccatgttgtacaccaaggtgaccagcatgctgagcaccacgggcatcgccagcgagaaatacgcctccggaatcggcgccttttcgaagagttcgttatccatttccgtcccttggtgtttcgttcttcagtcactgtgcaggatgtcgttcggcgtgcatcacaggcattgtagaggcaacagtgtggacaacgggcgggggagtatctcatgatgcggtgagggcgttgatgatgacgcatcgtgtattggcggccgtgtgcatcgtatgtgaacctgtgctggcgcggcgtacgcacgatgggaaaagaaagaatatatggaccccgttgtcccggttattgttcagttttactgtgttgaattattgcgttattcaattattgtggtgtgccggccgattgcggcctgcgggggattgccttcgtatgtgtcgtgcaatctcatgaacgggattgttcgctagattcagcgagcgtccttgttggcggcgttgatgatgtcggcgaacatcttggagtcggcgtagccggcgcgggcgatggcatccataccggagagggcgagaccgcgaatcatggaatccttgagagacataatcattacctttcgtttgcgcatcgccgtgagcggctttgcgattgttgtttaagctttgttgttatggggtccgtggctaatctgattggattgccggaccggagccgatggctcagcgagcgttcttgttggcttcgttgatcaggtcgacgagcgtgctgctgttggcgcgaccgcactggctcatggagctcaggccgtacacagccagaccgcgaatcatggaatccttgagagacatcatgtttcctttcgttggtcaaaaccttggggctttgagttttgtttatcggcttctttctgaaaccggtttcagaataacgcagtccgatgacaaacgcaaggggactattccgctctcggcgtttctggcggaatatcgccgttctttagataccattcggtagttaagaggttgtctagtcgaccttctgacggccttgttctgagcgtacggttttcacgaggtatggcctcatgtcgcggaaatcgtacgctgagtcgtcgtaagcgtacggttttcacgaaatggggtctcatctcgtgaagaacgtacgctgagtcgtcgtaagcgtacggttttcacgaaatggggcctatcttcaccggattttgggcacaccggccttgagcagcttggtctcaagattgatggggcgtagcagatcctcatagaacacatggacgatttcggtgacgccctgttcccggagatgccgatcacgtctgcggtcgtactccattttcgcctggaggcttgcgcgattcttgttgctgatgtcggcgtatttggccatgccgtcgtattctgccacgatgatgcggccgtctgcgagcttccaacagaaatcgacgcgatatgacattgcgggattgtcgggattcatgaactgcacctgcagcagggggatgccgaaagacaattcggtgatctggccacgcatcaatgattcgccgccgttttcgctcaggggatccgcgtacttcagcagcttggtcacggagacctcgtcgcagacgctttgaatcatcagcgactgcacctcttcgatggtcgtcagggactttctcagagccgaatcgtatatgggcagcgcctgtgggaatgggaatgccgcgcagtcgagcagcgttcgcgccggagtcgtcaagagaatgccgttatgcttccgcgtcggaatccgattgatatagatgcggttgagacgcgcctcgtctccgccgccgatgccggacttcgaggcgatgtgcactgtgccgtcgtgcagggaatagttgtgctgcagtccgtatacgcacgccgcactcaaccccgcaaatacccactgagggtggattgcggacaacgcacgtatgacctgcaatgactgttgctctctggtcatggtgttccaaagtgttcggtcggcgtacaggttcttatacggtgacaccagctccccggcatgcaggcgacgtttcagggcgcgccgttgcgcatcactggtgccatagcagcagcgacgctcctgcttcgcctgctgcagcagtgcagaaacttccttgtgttctttcatatctcgacgctaagggtgattttgatcgttgcacaagctcaaccggcaaatgtggatactatgtcacgcgaattgttgctgtggataacttgaatcgacgtcgacggctttgccgacggtcttgtcggaggcgatattagcctaggacaccttgctgcgccgccttccataccgaaaacagtcatcagtgacaccgggggcatcttcagcgtacgttcttcacgaaatcagctgccatttcgtgaaaaccgtacgctcagaatgactcagtgtacgttcttcacgagatgaggccccatttcgtgaaaaccgtacgttgacgacgattcagtgtacgttcttcacgaaattagggatgatttcgcggaaaccgtacactcaccgcaactcagcgtacggttttcacgaagttatcgatttgggtataggttccccgtcatgaactacaatgaatcgcggcgaaaaacggagaaccgaagtcggagcgcggctgaacggatatgggtgtgactggatggctgtcatagtgatgccggttctctaacatacgcaataacaacaactgacaacaacaggggagacaaggatggcgagaagtgcgggccgcacccggccggtgatcaaggacgtggccaaactggccggagtctcggcaccgaccgtctcccggtatctcaacggcaccgtcaatgtcaccgaagacaagcgtgaacgcatcgccaaggccatcaaggagctgggctacgagccgagcattgtggcgcgcgctctgtcgaaccgggagatggactccgtggtggtgttcgcggccaatccttccgccttctccacgtccgaaacgaaccatggggtggaggccgccgcccgtaaacgtcggttcctgctcaatattgtttctttggacgagtccgacatggactccgtcaaggctcgcgtgcgcatgggtttgtcgatcaggccggcgggcgtgatcgtctacgagtacgaccgggccggcatcgccgcactggaatacattcccaaagatatgccgatggtcgtggtgggtggcagcttcggcgacggcgaataccaggtcatcaacgccgaaagggatggcggccgttggatgaccatgcatctgctggatctcggccatcgcaccgtgttccatgtggggcgtccggaaggtccgaccgataacacccgcaccaatgggtggcgtgacgcgctcaaggagcgcggcgtcacggcacctgacccaatcatcgtgcccgacgatgatttggaggagtcggtcaaggctgggcgcaccttgggccgtcgtggtgatgtgactgcgattttcgccggcaacgacgagaccgccatcgctgtgatccggggtctaagggaggttggtcgccgcgtgcctgctgacgtgagcgtcgtaggctttgacgaccgcaacttcggtgccatgtggaatccggcgctgaccagttacacccagaacttcctggacatgggggagcgatccttccgaatgctgttcgaacagatccaggccaagcgcgccggcgatgacgcgccgccctcgcaggtcgaggtggtgcaaggcaagccgtgtctgcgagcctccgaacgcgcgtacggcgacggcgaaatcgcgtagtcgatggggcgtgcgtatcaatcgatagtgactgtagcgcatccatatcgtggtgaggagtctctcatgccgaactgtaagcgcttaccttaagtagtttgtaatatggtttacgtcatactaatagatgttctaaatcatagtgttttgcaagggcttttgcggaaaatggctatttatcaacagttttcaaaaagttcgcatgacgggcgactgtgagcacgctttatggtaaccgctttccgcagcattatcgttagagtatgacttttgaacaatcggcaactctgaagactcagccccagacctcgggcactatctcagcggcagacgccgcgatgcaataggcccgcgacgaacgcatccccggcaaactcatctgtgcgatcatggccgtggtcattgttatcgtgttcgtcgccatgctccacgccctacgtaaccggaagtaggttgtaggcgggattggtctgactggtatccgccacagccgggttcggtagagcggctaccaatcggccagtgtctctatggcatcgaatcctgttctgcgatgttgttcgtcaaggttgttccagtaaggtgattcatcggtgagcatgtcgtacgggagcttgatacgtctgcgatccgtgtggctatgtagtcgccgagtttcggcatcagggtcggtgatgagggatgcgagcattgcggcatcgtacagatgtctatctccatatccggcatggtctgcttggtatgcggcgctcttaagaatcaacgcgccaagcagatccgcgtcggtagcgggacgcacgtcgagaccgcccatgatggcgtgcaactgcaccatgagaccgccggtgagcagtcatgattcggcaatgcgctcggccaccatgtatacgatattccacggatgagcgccgctggggattgcaatgcgggaaatcattgctcatttccttgttgtatgccgtgatgagttctgtaagggtttcgagcccctgcgcgtcgttctctcgggtcgttggattcggccagatcagcggcgcatacgccgatgggcatgggcccctgcccggcgggcagaaaatcagcgagatgccgtgattcggcgggagacctcgtgatggccccagcccttctgttcggtagtggtaccgctacaccgactctccccgacactccagtgccgccgatatcagtgaatgcccagcctgatgtcggtagagtaaaggctattggcttggtctcgacggcgagacttctccaatggccaatatgcactgttgcaaaggagtatgcggtatgcaaccaatcaaagccattcaatacggctgcggcaaaatggcgaagtacacgattcgctatatgcacgagaaaggcattcaaatcgtcggtgccatcgacgtgaatccggaagtcgtgggcatggatgccggtgtgtttgcaggcatcggccccatcaatgtgccgattcgcgccgatgccgaggctgtactcaacgagtgcgacgcggatatcgcggtagtcacgctattcagcttcgagaacgaaatcgccaccatgtgcgagcagtgcttggcccgcggcatcagcgtgatcaccacctgcgaggaatgcatctacccgtggaccaccgatccggccaccacgaaccgtctcgacatcatcgccaaggaagccggtgccaccatggtcggctccggcatgcaggacatctactgggtgaacatggtctccaccgtcgccgccggatgccacagcatcaagaagatcaccggtgcggtgagctacaacgtcgaggaatacggcctggctttggccaaagcgcacggttgcggtctgaccgccgaggagttcgaggccgagcttgcgcatcccgaaaccgtggtgccctcgtatgtatggaattccaatgaagcgctggcccagaagcttgggcttaccatcgcatcgcagacccaggccagtgtgccgtatttcagcgatgtcgacgtgtattccgaaacgatgggcgagatgattccggtcggcaaatgcatcggcatgtccgccgtggtaaccaccgaaactaatcagggcatcacgttggaaactgcctgtatcggcaaggtgtacgggccggatgatggcgatatgtgcgattggaagatcgagggtgaaccggacgtggagttccacgtggtcaagccggcgaccgtcgaacatacgtgcgccacaatcgtcaaccgcattccggacgtgctcaacgcgccagccggatatgtgacggtcgatcagctcgatgagatttcgtatcttacgtatcccgccgcgctgtacgtggcatagactccatattttcagggatgaaggccggcactcataagggtgccggccggtatcaggcggccagagtcgacgtgcgtggcatcacctggaactggatatggtcatgggtgatgtcatcgggccgttcatgccgtaggttcgactcgttcagcgtcaccatgcgatcgataaccgtacgagccattgcggggacgtccatcgccacagtgctgatgggtgggttggtgcaggcggagaaggggataccgtcgaatcccatgagccgtacgtcgtcgggcgcgtggatgccatgttcggtgagttcgcggagcgcgccgatcgctatggtgtcagacatgcacagttctcatgttcccgctggcgggagctgtcatgcgaagcatgactgagggtggtccacagccgccaatccgtaacatcacccaacgcagcatttcacgatacggacgtttccgtatcgtattttcgtgtggtcaaatagacatttcgagcgaaaaagttcgaaatacccccataactggccataaaaaaaatgcttgagaatcactattgacttttatggcgactcggtatatggacacatgaaacgtaaatgacatggagcgacggtactgtgtcaacagcaatgaacgaagaggcatgattttcttacgtgcccacaaccaattgaggtgatttcggtgacattcaaagccccgctcgatctcacggtccacgctccggacggtatgtatgatcccgccaacgagcatgacgcctgtggtgtgggtatggtcaccactttgaacaagcgtcctgagcgcaagatcgtcaccgacgccattgaggtgctggtcaaccttgatcaccgtggtgccgtgggtgccgaggagaacacaggtgacggcgccggcattctgatgagcatgccggatgagttcatgcgtgccaccgtgcccgccgaactgccggaagccggtcactatgcggcaggcatcgccttccttgaccgcgacatcgaaacctccggtcagcaggaacaggccattgccaagatcgtgcgcgaggagggactcgaagtcctcgcatggcgcgtggtgcccaccaacccggacggccttggcctgcaggcccttgccgccatgccaggattcaagactctcgtggtcgcctctccggacggtgctctggccggcgtggacttggatcgcaagaccttccgcatccgcaagcgcgtcgagcatgaggtgggcgtctacttcgcatccctgtccgcccgtaccatcacgtacaagggcatgctcaccaccatgcagctcacccacttcttcgaggatctgaacgacgagcgcatgaaggccaccatcgccatcgtccactcccgcttctccaccaacaccttcccgagctggccgctggcccagccgttccgtctgctggcccacaatggcgagatcaacaccatccagggcaaccgcaactggctctccgcccgtgaaggccgcctgagcagcgaactgctcggtgaattcgagccgctgctgccgatcaccaccccgggctactccgattccggcaccttcgacgagtgcctcgaactgctgcacctcgccggccgctccctgccgcacgccatctgcatgatgctgccgccggcttgggagaagaacccggatctcgatccggacgtgcgcgccttctacgagtacaacaacacgcttatcgagccgtgggatggcccggccgacatcgtcttcaccgacggcacccaggtcggcgccctgctcgaccgcaacggcttccgtcccggccgctggcagctcaccgatgacggctacatcgttctggcctccgaggccggcgttctgccggagatcgcgcaggaacacatcgtgtccaagggtcgtcttgagcccggcgagatgttcttggtcgacaccgccgaaggccgcatcattcccgatgaagaggtcaagaggaacctcgctgcccagcacccgtaccgcaagtgggtggaaggcaactccgttgaaatgagcgacctgccccgccgcgagcacgtcagccactccggccagtccgtccagcgccgtcagcgcgccttcggctacaccgaagaggatctgaagctcctgctcacgccgatggccaacaccggcaaggaaccgctcggttccatgggtaacgatgcgcctatgcctgcgctttccagccgcagccgcatgctgttcgactacttcacccagaagttcgcacaggtcaccaacccgccgctggactgggagcgtgaggagatcgtcacctcgctcgaatccgccatcggccccgagccgaacctgctggccgattccgagctgcacgccaagaagatcctcatcccgctgcccgtggtcaactctgatgagatggcccagctcaagcgccttgacaaggcccgcatcctcggcggctactaccgcccgtacgtggtcaagggcctctaccaggtcgccggcggcggcaaggccctcgaagagcgacttgacgagatcttcgccgaaatcgacgaggccatcgccaacggcaagaacttcatcgtgctctccgaccgtgagtccaaccatacgtggggtccgatcccgtccctgctgctgacttccgccgtgcagcaccacctgctgcgccgccacacccgtacgcagatctccgtggccgtcgaggccggtgacgtgcgcgagattcaccatgtcgcgctgctgatcgcttacggtgccgcctgcgtgaacccgtacctggcattcgaatccgtggaagatctggcccgcaacggctacctcaaggtcgacgcggacaccgccgtgaagaacctcaccaaggccctctccaccggcgtgctcaagatcatgtccaagatgggcgtctccaccatcatgagctaccgtggcgcgcagctgttcgaggctgtgggcctgagccaagaagtcatcgacgaatacttcaccggcaccacctcccgtgtgggcggcgtgggccttgaagaaatcgccgaagaagtggccatccgccaccgcgtggcctacccgaaccagtggagcgcgtccccgcaccgcaacctgcgcaccggcggcgactacaagtggcgtcgcaccggcgaggaccacctcaacgatcccgaggccatcttcctgcttcagcagtccacccagcgtggcgactaccagatgttcaagaagtattcgcaccacatcaacgacacgtcgaaccgactcatgaccctgcgtggcctgatgaagttcaacaccaaccgcaagcccatcgacatcgccgaagtcgagccggcctccgagatcgtcaagcgcttctccaccggtgccatgagctacggctccatctcgcaggaagcacacgagacgctcgccatcgccatgaactcgattggcgcacgctccaactccggtgagggcggcgaatccgacgaccgtatcaatgatccgcagcgctacagccgcatcaagcagattgcgtccgcccgcttcggcgtgacctccgattacctcgtgcacgccaccgatttgcagatcaagctcgcccagggcgccaagcctggtgagggtggccacctgcccggagccaaggtcccgccgtggatcgccaaggtccgtcacgccaccccgggcgtggagcttatctccccgccgccgcaccacgacatctactccatcgaggatctgaagcagctgatcaacgatgcgaagatggccaacccgaaggcacgtatccacgtcaagctcgtttccgagttcggcgtcggcaccatcgccgcaggtgtggccaagtgccatgccgacgtggtgcttatctccggctatgacggcggtacgggtgcagccccgctcaacgccatcaagcacgccggcaccccgtgggagatcggcctgtccgaaacccagcagacgctgatcctgaacggcctgcgctcccgcatcgtcgtccagtgcgacggcgagctcaagaccggtcgtgacgtggtcatcgccgccctgcttggtgccgaggaattcggcttcgctaccgcagccctgatcgtggaaggctgcgtcatgatgcgcgcctgccagaagaacacctgcccgcagggcattgccacccaggatcctgagctgcgcgcccgctttaagggcaagcccgagtacgtggtcaacttcttcatgttcatcgctgaggaggtgcgcgagatcctcgcccagctcggcttcaggactcttgaggaggccatcggccacgttgagtgcttggatcaggacgaggccatcaagcgctggaagtccagcggcatcgacctgtccaacgtgctcaagcaggccggcccggtacccggcacgatcctgcaccagaccatcgagcagaaccacgagctggagaaggcgctggacaacaagctcatcgaacttgcccagccggccctcgaacacaaggaacccgtgcgcatcgaaatgccgattcgcaacgtcaaccgtacggtcggcaccatggtcggctacgagatcacccgccgttacggcgaggaaggtctgccggacgacaccatcgacatgaccctgcacggttccggaggccagtccatcggtgcgttcatcccgcgcggcgagaccatgcgcatctacggcgaagtcaacgactacgccggcaagggcctgtccggcggtcgcatgatcgtgcgcccggaagataacgtcaccttcgacaagcacagcaacgtcatcgccggcaacgtcaccggtttcggcgccacttccggccagatgttcgtggccggacgcgccggcgaacgtttcggcgttcgtaacggcggtgccacgtttgtggtcgaaggcgtgggcgaccacggctgcgagtacatgaccggcggcactgttgtggtgctcggccccaccggacgcaatttcggtgcaggcttctccggcggtaacacttatgtgcttgacctcgatatgaagaaggtcaacccgggtgccatcaagtccggtgcactgctcttcaagtcgcttgatgccgaaacctccaagctggtgtacgcactggtcaagcagcatgccgaagagaccggttctcagttcgctgaggctttgctggaggactggaacgagaccgtcaagcggttcactcacgtggtgccgaagcagttcgtggccatgacgaaggccatggaagaggccaagaccaacaatgtagatttcaatgcgcccggcgcctgggaaaaggtgtacgagcaggttatggaaggagcgcgctgacatgggcgacccgagaggattcctgaaggtccgtacccgccgagagctggctgaacgccccgttgaggaacgtatcaaggactggttcgacgttcacgccgaaaccggcctgcaaccgtggacccaagcgcaggcggcccgctgcatggattgcggcaccccgttctgtatgaccggatgcccgttgggcaacctgattcctgagtggaacgatctggtccgtcagggcaagtgggaggacgcgtacaaccgtctgtccatgaccaacaacttccctgaagtcaccggccgtatctgcccggctctgtgcgagcaggcctgcgtgctcggcatccaccagccgccgaccatgatcaggcttgacgagcagaccatcatcgatcaggcctgggatcttgacatcgtcaagcctttgccgccgcagcgtctgaccgaccagacggtcgccgtcgtcggctccggccctgcaggccttgccgctgctcagcagctcacccgcgccggccacaccgtcgtcgtctacgagaaggacgacgccatcggtggtctgatgcgttacggcatcccgaacttcaagcttgaaaagggtctgatcgaccgccgtgtcaagcagatggaggccgaaggcacccgcttccgcaccaacgtggaaatcggcaaggacatcacgtgggatgacctgcgtgaccgttacgacgccgtcgtggtggccatcggctcccgcgtgccgcgcgatatgaagattccgggccgcgagcttgacggcatccacttcgccctcgacttcctgcccgacgccacgcgccgtatcttcggcgtcaagccggtgcacgacatcaccgccaaggacaagcacgtggtggtcatcggcggtggcgacaccggttccgactgccttggtacctccatccgtcagggtgcgaaggatgtcaccgtgctgcagatcatgccgaaagagccgtcttcacgcccggacaacagcccgtggccgaccttcgcccgcacctaccagaagacttcctccatggaagagggtggcgagtacatttactcgaccgactcggtgaacttcgaaggcaccgaagaggagaaggccaaggtcaccatcgacaactcgaccaccgccgaaggcttcgtggccgatgagcgtggtcatgtcaccggcttgaaggtcgtctccgtggctcccggcgaaaatggtccgttcactcgccagcctggcaccgagcgcgtgctgcccgccgatctggtcctcatctccgtgggcttcctgcacccggacaccgagaccatcctcgaccagctgcccgtcgaactcgacaagcgtggcaacatcgctcgcaatgacaagttcgccacctcccaggatggcgtgttcgtgtgcggcgatgccggccgtggccagagcctcgtggtctgggccatcgccgaaggccgctcctgcgccgcagccgtggacgagtacctctccaaggaaaagagcgagctgccggccccgatcaaggccagccagcgtccgatgatgctgcctcgctgaatactttccaaacagaaacatgaaaatcccttcttcgtgaggggatttttgcgtttctgggattaattactgccttgagccttcagtaatgtttatatttcgagaatattgcatacgtggttaacatgaagctcctatggtgtctttcgtcgccaaaaagatgacgccagaatatttgggagagattcatgaacacacgccatgtcacttcactggtcgcggccggtgcggcaatcgtcatgctgctcagcggctgcggatcgaccggtacctccaattccagcaatgcttcagattccaatatcatttccgtgtacggcagtgagccggcacacccactattccccggcaacaccactgaggccggtggcggcaaggttgtagaccagctgttcgcaggtctggtgacctacgatgcgaagggcggcatccacaacgaggtagcagacagcatcacctccagcgacaacgccacgcattacgtcatcaagctcaagagcggatggaagttcaccgacggcactccggtgaccgcgcactccttcgtaaacgcatggaattacaccgccaacagtgccaacaagcaggccagcgccagcttcttcagcacaatcgaaggctatgatgatctgcaaaagccggacgtggaccccaaggccacgctgagcggcctgaccgtcgttgacgacaacaccatcgatgtcaagctcagccagcccgactcggcattcccggtcaaggccggcagccacgcctacatgccgttgcccgaatccgcgttcaaggacccgaagaagttcggtcagcacccagtgagcaacggcccatacaagttcgtgtcctggcagcacaaccacagcatcgaaatggtgaagaaccctgactacaagggcaatcgtgtcgccaagaacgatggcctgaacttcaagatctatacctcgcctgattcggcatacgccgacctacgcggtggcaacctggacttcacgaacacgattcctgacaccgcacttacctccttccaatccgacaagtcgctgaaggcatacaacgagcccggtggcaatacgctcactttcaccattcctgaatggctggaacacttcggccagaacgaggaaggcaacctgcgtcgtcaggccatttccatgtccatcgaccgcaagaccgtcgccgagaagatcttccacggtaccgccacgcccgccgtcgacttccttgcagccccaatcagcgcctactccaaggaactcaagggaaatgaagtactgaagtacaacccgtccaaggccaaggaactgtgggccaaggccaacgccatctccccgtggagcggtgagttcggcattgcatacaatgctgatggcactgcgaagaactgggttgaggcaatctgcaactacatcaagaacacgctggatatcgatgccaagagcatcccgatgtccacttccgacgaattcctgtccaatgtggattcaggcaagatgacctccgcataccgtagcggttggggccctgattatccatccgcggacaactatctggtacagctgtacgattccagttcggccgacggcaagggcggcaacagcggcaactacaagacccccgagttcgatgccatgatggacaaggctctttccgccccgtccaccgaggaagccgacaagtattatcagcaaggtgaggagattctgctgcaggaccttccggctatcccgttgtggaaccagaatgccaccgcagccagcacctccgcaatctccggcgtcgcattcgactacggcggcggcccagtgttcaccgcactgaccaagaagcagtaagcagtaagtaataaacagacagcgctagccccccgctggcgggggctgtcggcaaagccgactgggggtggtctcaaacagcagaccacccctaatcttgttatatgagcgagctcccgtaagcgggagcaatcgagaacatacaggagcacattaactatggaattcaccgtatccggcactaccgtgcgattcgatgaacgaacgatgcagttcgcttttacgcgcgacggtgccgaatggaatacctgcgctgatttcaagccgaccctgcaatgcgcgcaaggcaccttcgcgttcgcggatgccacttccatcacccatgagcagcgtgaaaccggcacgggaaccggcattcgcagcatcttcaccggctttgggcacagcgcatactcctttgaaacctatgtatgggtggagcgtgcctcaggcgatgtgctcttcgaatggattccgctcaatgagcaaggcctgaacatcaccaatgtgacgtggcccgcagccatggacttcgattgcgccgacgaccatgacacgacactcatcacccatgagcaaggtgtgatgatccccaacacatggcctaccgccgtgagcaccaaagacatcgccttcgacggccgcttcgaaacggctggcggttacatgccgtggttcgcgcagctccgcgcagacggacacgggtatatcgccatctgcgaaactccatggaatgccggttacggcatcgaccatcccagcaatggcccgtacacccatatcaatacttggtttgagccaagcctcggcacaatgaattatcgccgcgtggtacgctaccagttcctcgaccacgccgaccacacggcggtgtgcaaggcctatcgttcgtacgtcaacgaacgaggtcgcttgcgtacgctcgccgaaaaggcggcgcgcaatccctccgtgcgtgacctgattggtcgttcatgggtacacgtcggcatcaaaaccaaagtgcagcccgactcgttctactatgacaaggaccaccccgaaaagaacgattcattggtcacctttgcgcagcgcgagaagcagatgcgcacactgcacggcatgggtgcaggccgactgtacatgcacttggatggttgggcgcagcccggatacgacaatgcgcaccccgactatctgccggcttgccaggaagcgggcggctgggaaggcatgaagtcgctggtcgacgcctgccatgagcaaggcgatattttcggcacgcatgaccagtaccgcgattactacttcaccgcacaaacttttgatgccaacaatgcgattcggctggcagacggtacgatgcccgaacacgcacgctgggcgggcggccaccagacctacctgtgcgccgagctcgcaccggactacgtgcgccgcaatttcgccgaaatcgccgcacacggcatcaaactcgactgtgcatacttggatgtcttcacctgcaacgaaggcgacgaatgctcgaaccccgaacaccgcatgacccgccgcgaatgctttgaccgccgcgccgaatgcttcgaatatctgctctcgcacggcatcctctcctcgtccgaagaggtatcggactgggcagtgccaagcctgatattctgccattacgcgccatacgacttccagatgcgctcacccaacgagccgcgccaaggtgtgccggtgccgctgtataacctcgtctaccatgattgcgttatcgagccgtggatgatggagcgtgtggtggacggcgacgattacatgctgtacgccttgctcaatggcggagctccatacctgattcgcgatgccgcatacatcggcgttgacggcgacatggacgacgaacagcgcgctcgcacggaaaacgacatcgaacgctgccatacggtcgctgcattccatgagcgggtcggcatgcaggaactggttcgtcacgagttcgtggatgatgatccgctggtgcagcgttcggtattcgcggacggcactgcggtcacttgcgacttccatacgcaaacctatcgcatcaccgattgaccgcatcactgactgaaaaaacaatgacacacagtgggttccgatggactggtggcaaattgccgccgataagcgggtaatatagccaacagtgtcaccgtcgaaacaggagtagtgaaatgccgaatcgtgcagaacgccgtgcccaagccaaagcaggccgcaggggagtgccgtcgcagtatgaccagacccgtggccgtggccgttcgggaatgattgacgaataccagctgcagcagaagtcccagcgtctgcaggacggcaccgacggcaccgaatggaagcccagcggcggtacgattgcggacaccgaaaccctgctgaccactaacccgaactacacgaatccgaagatgttcaaggcaccgcattcgctgcgtcagtggttccgtgtgggcagctggacgctgatcgccatcgcgattatcgcgttcttcgtggttatgtggctgccaagccatccgatgtggctgatcatcaccgtttccgcggtgttcattgtgggtgtgctgagcctgttctttacggctggcgattccaagcataatccgaatttggatcagaacggcacggccgtctgatttttttgcctggtaaatccggcttgaaaagcaaaacgcacgacggaagttgtgcgttttcttgtatgcggtgccctaaagtaagaagtgcttgagtttctttctgacgcacgaaggagaggcagtccgatgaaagttgatattctaacccgcgaatacccgccgcatgtctatggtggggccggtgtacacgccgaggaactgtccaaggtgcttgccgagcgcatcgacgtaaccgttcgtgcgtttgatggcaagcgcaccgaggcggacattcctgctatcccgaatgctgccgatgctaggggcagcttgaaggtcgtcggctatgacacgccttctgagctggctgatgccaaccccgcattgaagaccttcggcgttgatttgcagatcgccaatgatgtggacgccgacatcatccacgcgcacacctggtatgcctgcttggcgggctacatggccaagatgctgcacggcactccattggttattaccgcgcactctctggagccgttccgcccgtggaagcgtgagcagctcggcggcggctacaatctgagctcctgggctgagaaggatgcttacgagcacgccgatcgtgtgatcgccgtgtccggtggcatgcgcaaggatattctgactgcttacccgaacctcgatccgaacaaggtggttgtggtgtacaacggcatcaccatggccgacttcgctaccccggcaccagacgatccgggttggaaggtgttcgagcgttaccacatcgaccgttcgaagcccaccctgctgttcgtgggccgtatcacccgccagaagggcctgccatacctgctcaaggcactgcacctgatttccaaggacattcaggtggtgctgtgcgcgggagcgcctgacaccccggaaatcgccgaagaggtcaagatcgcgttcgccaagctggatgaggaacgcggcaacatcgtctggattgaagaaatgctgccgaagcctgagctgaatgctttggaacacggctgtgatgccttcatctgcccgagcatctacgagccgctgggcatcgtgaaccttgaggccatggcctgcggtctgccggtcgtcgcatccgccaccggcggtattccggaagtcgtggtcgacggcgaaaccggctatctggttccgatcgaccagttgcacgacggcaccggcactcccaccgatccggacaagtttgtacacgatatggccgccgctatcgacaaaatcatggctgaccccgaactcgccaagaagatgggccaggccggctacgaacgcgcccgcgacgtgttcagctgggagaccatcgccgacaagaccgtggaagtctaccagtccgtgctcgacgagcagaagaagtaagtagcgctgcaacgagtgcccccctcagtccggctgcgccggccagctcccctcaggtaccggtttcttggctcccctctttgaggggagtcgtccgcgaagcgtactgaggggagtcctcagatcgcgaatcatagttagtatttcactcatgacaaacaccgtcctccaactcgacaacgtcgaattccggcgcaaccgtcgcgtcattatcaccgacgtgaacctcaccatcaacgcgggggagcgttgggtgctgttcggtccgaacggcatcggcaaatccaccgcggtcggcatgctggccacccgcacgttcccctcggaaggccgcgtattcatcctcggccatcaactcggcaaatacgacgtattcaaactgcgcacccgcatcggtctcgcctcggccgacctgggccggcagttccccgagttcgaggacccgctggacgccgtggtcaccggcctgtccgccgtgaccgggcgctggcgcgacacctacacgcaagaggaatacgcccgcgcccgccagctgctgcgcgattttcgcgtctcctatctggaaggcaaggagatgtggcgactgtccgaaggcgaacgcacccgcgtattgatcgcccgtgcgctgatgggagatcccgagctgctcatcatggatgaaccgaccaccggccttgacctgggcggccgcgagcaggtgatgcgcacattgagccgaatcggcgaagagaactccgagcgtgccgtggtgctggtcacccatcgcttggaggagattccggccggtttcgaccacatcgccattatgggacgcaagccgattcccgctgaggacgccaccgaagcgggcgtggattcaatgggtaatcccggtgctggcaccatcgtctacaccggttcgttggagaatggcctgaccgacgaacgcttgtcggaattgttcggtatgcccatcgaagtccagcacacccacggccgctgggccgcctacgccgtgtgatgcttgtaggttttaggcgggattttcttcgccccctctggaggggctgtcagcgtaagctgactgggggaggtcaaccagttacgaaggcaaccatgacaaccaatagcaaactcgtattcatcgatatcgacggcaccctagccgacgaaaaccacgtcgtacccgaatctgccaaaatcgcttgcaaacaagcccaggccaacggccacaagctcttcatctgcaccgggcgttccgtgccgaaaatcgagcgcagcatcctcgacctcggtttcgatggcgtggtttccgtggcgggcgctcaggcgaatatcggagacaggctgctgttccagcatctcgtccctcctgaagcggtcgatgcggcgatggcgtattttgccaagcatcatatcgagagctaccaatggcaaggtgcggatggcatgtacatctcggaaggctaccgtcaacatctggaatcgaaaggcaagacctggaatcgtggcgaattcgcgcgattctggcacctgttggatgaggtggaggtgccggctggctcgactttgggacagacgattcgtgtgagcaaggggtcatacttcacctcgccgaatcctgacgtgactttcgaggagactcaacatgatttgagcccatggtttgagctcgtgcatggttcatatgacaagatttccccgaacaatggcgagttgctgattaatggcatcgacaaaggtaccgctgtgcgcgacgtggcttctttgctgggctatgccattgccgacaccatcgccatcggagactccgacaacgacaccgccatgctcaaggccgccggcacatccgtagccatgggcaacgccattcacggcatccaagccttctgtgacttcaccaccaccgacattcacgaggacggcctggccaacgccttcaaaacgttgggactggtgtgaggctatgtcgtttgctctcagacggaggaccctttcgtgctgtagtattgcgacgcggcacaacgtatgctgcgccgagcatagagaattatgaattcaaaatggtttgttcatcatgcgaagatagtggtcatctgtccgtcgcggttgcgcaatttacggtggcggaggaaccggaacggaatctggagatcatcgacggattcgcgcgtgatgcggcggcgggcgatagggaagccgatctcattactgctgagctgagtcgtgagtgtcttgattccgcgcgtcgaacattgccggtattgcagaatcgccgttttgccgatccgcagttgtgtgactgacctctgaataactttactagcgctgttgataagggttctatgatgggaatcatgaccactactgttgatagctctgattcaatgccggaacgtctgcaagaggggagcgtggcgcccgatttcactctgccggcggttatacctgggtttacagagagcggatcaatcaacctgtctgacgtgcttgatgccggccgcagggttgtactgtacttctacccggccgcgatgacgcccggttgcaccaccgaggcctgcgatttccgcgacaatctcgcccgattggcgtcgaagaatgtcacagtgctcggtgtctccaaggactcgcgtgacaaactgcgcaagtttgcacagcgcgatcatctcacattcccgctgttgtctgattccgacctgaccgtgcacaagttgtacggcgcatacggcgaaaagaagctctacggcaaggtgcatgtaggcgtgattcgttcgacgctcgtcatcaatcctgacggttccgtggttatcgcccgctacaacgtgcgtgccaaagggcatgtcgattcgctgttgaaggcactggagaaactggataagtagcgcgttctcgttgttcggacacagtggtttgtgcggtatgtgccgcatgaaccactgtgccgtatgagtcaccggttagcttctcattggattcaccggccaatagtgaggccgtgggcgcgcagtatgtctatggctggcatgtaatcgagcgacgtggcggtgggatcgagcatcagttcgcggatggcggcggatgctgaggactcgcttgtcttcgaggattctgcggccgggaagagagcgtcggcgattagggagatgatacgggaacgtgcatcgccggcattggcatcgttgctgttaccggtgccggtgccggcagtggcggattcgccaatagctgcggagttgcttcgtagagtcgtatccaacgctgcggcaagcggctcgagattgttctttgtcgcttcggcaatatcatcgagctggtcgaataaggcgaacagccatgcacgacgttgcccttcatcgttgccagccgcaaacctttcattggtgacgcgcacgagttcatcaatcggtactgctggtgtctttgcggggtcgcggtgttcgcgattatcttcgatatctcccatcagatgctggatttcgcactcgtcctgcaatacggtggtctcggcaaatgcggtggcgatggcgtccgcatcgatgaacttgccaccttcggactggaagcgcacgcgcttgggctcactgtaataatgcgacatgccgaatgtgatgtactgaggcatctcatcctgcaattgcttgaccgcttcggccaccttgcgcatatctgccagatgttggtgcagcacgatgaaagcgagcactgctttggtgtcggtaagagtgagcggctgaccgatgctggctccatgatggtgctcatgatgcgcaaacatgttcttcagcgaatcaaacaatcccataatgtcctccttcgaactggggcacaatcggctacatctgccgcttactgtagtccggaagacttgagattgttcacggaacgccgagagcgaataccgaggtcgcgcagcaatgtacaggaaagctcctgatagcgaggagactgagcgcaccgctaatttgttggggcatcatatcggaattatgtctagacagaaacatagatgtcggagcagccatgcgccgggcatggaatcccaaacctaagagattatgtcttggggaaagtatctattgagagttgctttcagacttggtcgattagggtatcgagtgatgatttgatttgcaatgcaacaagtatccatatatccaaaaattgcctcatatcgtgacaatgtttgtttgatatggccatatgccgacatgttgtcggcaagaagtaggtgaccttgcaacgttccttttggcaggcctcgcaatgcaatggcatcggcgtcgagtcgatgcttgatggctaagatcctcagaagcttgtatgaaggatgctggagatatttgacatatctcagcgtcgtgtccggcaatctttcctcaatgatgattcgttcgagcgcaggatcccggtcatgcttttgcgttgtttctgctgtgcgttcttcgagtacattcagacagtcctcgacgagtttcggtacaagttcatggaagttatgcgggcagatattgcgcaagaaccacacgtattccatgtcttcgggacgagtggcatgggctatgacatatgagaataatgcgatgagctcttctctcatttgcttgtatgcggagagatgccgaagtatggcaatattgtatccgtttgcataatcatatgggcagtaagccatgagatttgattgcgtgtgggctaattgctccggtagaggcatacgaacgggaatggacatgctctatctcccgtctccgttgtgggtctgtttgattgattctatatcgatttattggagctagcgcagtcccgaacaattggtgtctttaaatccttgactaagaatggcaaacaacaaggttgagcttctctgtgtcaatgactttgttgtaccggaatctgcttcaggcttcagccggagcagatgatttgcgcggtaacagtgagtatgctggtgatgttcaattcaaaatggtttcagagaggagccgcctatgcatcaaatcaacaaaacagaaaagaagtgcgcgcgaaggccaaagcatgttttgcgaagactaggcaaaacagtatggaacatgactgattcggtagacaccgttgccaagccgattactgtccagtatcagcgaatcaaaaaggaaatattgcgtattcggcaattggaaacccgtggattcgcggacatggatgtctggtatctgggaagtagggaaatcataagaatgtcccagttgctgaccgcaatggagaaacactgtatgagtagcccatcaggatatgacgacagctctcgctggttgaagcaacgcactgatgacgagttatcgcgttggctcgaatccacgcctttttgggcattcctagacgcgttggagcataatgacagaggcagcacgaggaagacagtacgtgaactcggtattggatactgtgcatggcgagaggatcttaagtatgcggctgccgtgctcgtgctgaccgataaatggcgacctaattcatcggattcccattaccgtccttaccgtaatgttttcgggacagatgcagcatatgcggtaactaagaaaactgaggccgagttccgtcgcgtatggcggtggattggcgacaatatctacgatttgtgggactgagcgggaaggtgactgaccatggcggagtagccgcgcaagtgctgattattgcacggcgcttggcaagacttttaccgtcaccattgctgacgccagtgacgatactgctgatgaatagtgttgttcgataatgagtttgccggttggatattgcgttttgatgcaatatccaaccggcaaactatcacgaagcgtcaatccaacgtcggcgacgctgctaagacacagggttatcccagtcgctcatgtcatgatcggagttagctcgatttgcggagtgatttcatcgtcacattgaaaggggtgagacggcgctctgtgtcaatgtgcatgagacggtcgctgcgctctttcatgcatttgtcgcagatgagtgcggcgacttgtgtaccgtcgtcgcatggatcgaaaaaggtggttccgtaatgaccgtaggaagtcatttcgatggcatcaaggggcaggaatccgctgtcgttggcgccttcgacgagttgttccatcgtgcgggggtggttttcatcgacgatttcggcagttatcattttgccgcataccaagcacacaagattaaacggtgattcatcgacgttgctcatgtcattctcccggttcaagaacctacatatctggctcgctcaggtttggccatatgagagaaccgcaccagattacaacgtggatgatttagacacgtcgcggttgctgaggctaccgggagcatcagcaaagagttgcatcttaagaaagtcccgggaactataacgctattggtgcttcaggaaaggctccggtgaagcagcaagagctgtcttttgatgattggacctctatggtgccaatgcgtccgcagatgtggttggtggtgtactgccgagagactgattcggtgcggttggaagcgtctcttcctgcaggtgtggattctaatgggaaaatcattggctgggataagcgacttatattggatgaagtgaatttgaccgatcagtttgtggaggcacgtaacgatgagcgtggtgaagatggagttgccgtcgctatttccgcgcgttgagcagaagacttcgctgaatccagaacgaatccgctgcgcccgtgaaacggcaggattgagtaaggtacaactggccgactttcttggtgtcacttcgcgtacggttgctaattatgaggaaatcggagcaccggtgtctcaggcagcggcgctggctgatgcattgcaggtcatgccatcgttcttttccgtgtctcctagtgctccgctgattgaggatttatatcggatgggcaggtatggttcaggtcgttgaggaaatcgacggtaaggcaacgtcgttcggcagtgggacatggccgaaatgcattgttgttcttcaaatggattgaagatcacttccggctacctgaatgtgatttgccttttgccgatagcgccggaatgcgtccagactcggcggcgactatgctgcgcgcaattttgggatatggtgagaatccgttgcctgagatgacgagtcttgctgaagcacatggcatccgagtgttcagtttgccgactgtcggacgagaagtggatgctttcagtttttgttcgatggtgtgccgtatgtggctgtagataccagcaagaccgcagaacgtgtccgtttcgatatcgctcatgaaattggacatctgatgatgcatgaaatggtgtctgaagacgtagtggctgccggaacgcgcgatatcgaaagcgaagctcattcgtttgccgcaaatcttctgatgccggagcgtcgtgttttaggcatggtgccgactcatgcctcagtgccgcagattctgaccgcaaagcgatatttcaaagtttcagccatggccatggctcggcgtgcctatgaattggaccgattgtctgaatgggaatatcggcaagtttgctcagaattgacggtccaaggatacaagagtggtgagcctcgtggcctgcggccagagcagtcgaaggtattccgcttcgtggccgatacgaacaggcagaaaggcatatcagtttctatggtgagcgaggaaactggactcatacctcaagaattgcatggattgtcgtttgggaatatttgggcggttactggtggaatgcatagttaaataatgaattttgcttggaatatattgtcaatatggatagctcagtagaggaggatatggcaatgagttggaaaccatttggggccaaagaagaatctgagacgcttgttgacggggtccctccctatatggtgaacagtgttattgattggatgggtcaggccgagttgctgctttgttatgatgagaatcattattcttgtttcgatgaaatggaactagatagtcgtcgcaggcgttcattggtttctgaattcgatagaaaatctagattggattcttatctatatgatgcgaatacaaaaagttatttccgtgtcaaagagcatatgaatcgaataggtttgatgtatcttgattatttaattgagaaattggatgaattaagagaggattatgattcttctcttgtttctggccgaatgcctatcgtcgacagtgcggtggaatatctatatgaagatcttgaaaagatattatctgaatctggatctaagtggcgtgtaggtaaaaggaatggatattgcggactggaagaacgtgtttctcctatgatgcagcaaatagctgatgaactcgttgaatcaaaatcctcggccagccagttgttatctgatgcatggcattctatgtttggccgtaatcctgattattcggaggcgtatgctaccgctgtcaaatcagttgaagcagtagtactacccatagttgagccaaataataaaaaatctacattgagtaaggccgcagcagtaatgagagaccagaagtggtctttccagattgaggctaatccaaaaaataatgttaacggtggagttatccaacttcttatgagtgcatataatgtatagtcattccgatcggcatggcagcggagatggagttattactgaagaaaaggccaaggctgccgttttctcggctgttttcttagttcaatttttttcttctggtttagtaacacgaggcgagaaagcttaacatattatctagttgagtcggtaccgagcaactgcggcaatattcatgtgtcgataaccatgtgattatcgacggatatcggctattgctgaaaatgtatactaataatgactgagtaaccccttgctggtttgaagggttgattcgctgattatcgagagcttcgtcagttgtgttttcgttgtaataacgctggttctattaccttcggcagattcgttgattgcctctgatttcgctgttctcaggggtcatcgtgtctgaatcgtgtatgagctacagatacgatgacgaacatcattccagcggctgatgcggcctgatgattgagtgtcagtaatgttttcagtcaccggagtgcggtgccatgcgaccacgtgcgtcattcctcgcccgacaatccttgatggcctgatgaatctcatcgtcggtgaactccatcgcggccataagattgaccgtcgcttgaatcacgtcagcgcactcgtcgatcaggtcatggcgctgctctgcggtctgtccgtgcttgttccagtccttgaacgcctccaccacctccgcagcctcttcaagtaccttcaacgcctgcgacttgtcccgatgcagcaaatcagcgcggaacggttccacagctccgacatgcactctttgattcatctctctacctttacctttcctaagaatatatgcgtctgtttcgagtgttctctatcttaaaggtgtgtccacaaaagcagactggttcaatccggcttcaccctcaaacctctggatatacctcatcatttgtgtgttagaagggttcaccgattgacgtacctcctgcatttcatgaacggtattcagtatggaaagaacctctgagtcggtaatcccttttctaagatctagggtgcattcaatcttgggaattggaagtgcatacctttcactttcaatatcggataaagcggcctttcttcgcagccataccggatcgatattccttgtgaccagtaccgtcttccgtctaggcattcctgtttcgtattccagtcccgtttcataagcatcagtaacgctcataaaatagcagtcccacgcagcgttccatgccttatgagataagtcatcgatggattcattgccggaatacttagtcaatttacgtacttgttccgatcgactgttgcttccaaccagcatgtcaacggcgacctgaagctcatacgccgaaagtgagcccaactgagtattgacccacgagacatactcggcaagtaaattcagacgattatctgttttcatcttttgagccaacagcattatttttaacaatgaagcgtaatgaattgcaaattggacacagtcgcttattgtcccatcaaaaccataggccaatgggtccattcgagtccggtacggacggtctcgccatttcctatcgcgattgaccggaggatgccgattggcgaattgtctttcaatcacatcctcatcccactggaacaaggtttctgcgacataccgcttcctctggaaattattctcgtcgaatccagaacgccactgatgacacgattccaataaggcaaaacctatgctgggctccactctgtccttcacgagatacagcagtaaatcttttagagattgacgcttctcttcgcttgtctgagtgaagtaaaaatgctccatatcgatgacgacattcgtatccaacacggcgcactccgcaccgtcggacatgtcatcaccggcggataatagactgtactctccgatttgcactgtttctcgcatctcctcgaactcttgcgtagggacggacatgtcgaataggttgacctgcgtatcctgctcgtgcttgtcaaccctattaagcgtattgtgccttaatcggcatcagcccatgtaatcgattgcctatagcgttcaagcatctggctcaattcgtcgttggcacgaatgaactcccgaaggtaatcttcgctgatctcgaattgttcctgtgttttcttgtctttggttccaagaatctgttctccggcctttgacgtaatacggaagccatgaataatccgattacgtcgtaccacgatgtccgaaaacttcttttgaatgtcatctcccgccactttggtgattgtagcggcgatagtggttttcaactgcccggattccttatcgataaggtcacgccaagattgactagcatcagtatgaatcacattctcgatgatgaacccattatttgagctgaacacgcacatagcaatacccaacagacgaatgtattcctctgacggcaatgactgatgcgttaacgagatgtcatacatggcacatgctccaatcttcactccgcatccgacgatggcccacagctgccgatgctcacgtttgaggatgacgacagcacacggttacgtcgcctgaatgcgagcgagtaccgcataccagacaccttgcgctatccttagccttcggctaagcgtttccatgataccagcgtcatagctgcgtcattccggtctcttacgggctgaagctcgtatgatgggaacaacaccgcgtcaatgaagcaagcgaggtccctaaatgctcagcatgtcagacaccccaatcgagcggttcgcgccggtattcgctcggctcaacacccccgtagcgttccttgttcccacgccgaccggatacaagaagtccatcatggacgctatcgctccggtccgagagctcctatacgacgcgcacgtacatgattaccagcagcagcttcaagggaccgagaacaagcgcgtcgtcccggcgtttctggtgaagggcgatgggttggtagaaacgcaagcctcgctgtaccggccgacgacaaagcacggagacccacgcatctggttctacgatctcaagaaacactgccgcccatgcaatctgctcgcgctcacggtcatcgacgaggcaatctacgtcttcaacctttctgacccggaagtcgctgaatcgctactgcaacaggactacgcgtacggtatcctgcagcgcggtgataagagcagcgtcatcgagcagcagctcctcgcactcatccgcaagattaacgctgacggcccgcagcgttccatcacgcccggcgaccccggtgttggagatacgttggagcacgctctgggcattcagcgcaacaattccaagaaccccgactacatgggcattgagctcaagaccacgcgactgagtcgcaacggcaagatgcgcacgcctactcgctcaacgctgttctcgcaggtgcccgatgttggcatgaagtacagggagatcgtggaaaagtacggaaaggtgcaagtgcctcgtgggtccagcgaagcccgtctccaactgtatgagaccttccgagtttctcgccccaatgcctatggtctggttctggacgtcaacgagaacgccgaccgtcttgatatggaatatcaggacggcgacaagcgcagctacgtcgcttcatggacgatgaagctgctaaaggaacgactgcgcaccaagcaccctgaaaccttctgggtgggagcaacctccgaaatgattgatggagtggagtacttccggtacgtccgcgtgatgcacactaagaacccgaatgcgtctctgctggggccactgctcgaagccgacaaggtgacgctggatctcgccgctcacttcgaccctgacggcaagtggcgagatcacggcgtcctgttcaagatggacaagaagaacttcccactgctcttctcggatcccgaggagttcgtcttctaaagcgaagacagtatcgaagagaccaccttccccaatgcacgccccagcagcggcggtacggcgttgccgatctgcgtgtattggggaacctgatacctcctgcgtgcaccgcccgtggtggcaatgcctcggaactcgaacgaatccgggaacgactggatacgtgccatctccctgaccgacagtgtgcgcggctcagagtaatgagctacgtcatccgggattgacaaagccgccggtgccggcaacgtactgaccagtgcccgctgcgagaacttacgcgtcttcatgccggcaagataatcgaccatcgattcatggtcggtcggcagaccgctcccgtactccagaaggtcacgcttcagcagcgcctgataggtagcgtctgagatgtcggtcttctgcccgcgcataatcttcttgatttcatcacccacctgcttgggcgaattggcgatgacctgatacacacggaaccgagcttgcaccttgagggtactgttcggatgacgaaggttctgcatcttcggattcccgccctcaaggtagtcgccgagcacggagttgagctccttgacgtatttactgcgtgccggagcatccacatcctgaaggtcgcggatggcatcgtataccgtatgctgcttggacggatccctgaacgcgaccagcggagcgaacacggaaacttccgctctggaggcgtcagcttcgtcggtcaggtcccaataccgccactcgttcttgtcgtatgcgggatcctcgctctttaccgcttcaatcagccgcacgccctgagcaaaccatggggcgatgtcctcattgaggttggagacaaggtcttcacgaatcgcaagcatgatgaaacgcggacggttctgcgccacgccggcgaggcgcgcgttcaccagcatcgggcaggtggcgtatccgatgttcgcgaaggccttgcacacctcgaaccacgcgtagtaggtagtgctatccagcttgaaggggcgaaggattccttcgacgttctcaagcagcaccatgcgagggcgctgcacatcgacgaacttggcgaactcccacggcagctggttgcgctggttgccgaactcgcgacgaccggcaagagagaagctttggcatggcggtccgcctgacaccaaatccacctcgccatgcaccagagcgctgccacggtcctcaataaatgcgttcaggcgacggatgtcgccgacaatcagacgcccatcgaagtcgtcaatgcctgacagttccgccatgtcggtttcgggacgctcgaacggattgtccacgagtcgttccgaaacgttatccgaagacgagtcaatccacaggaccttacgatctttcggcttggcctgctggaactcggaggaacgcatatcgacgttcatcaggttcaaagcgaaggtctcggcgggcatggaggaaagctcgttcgccatcacttcccggaacccggccgagcgcagaccaaggctcaggccgccgcatcccgcgaacagctcgatgaaggtggggctgttgccttgcgtcaccttagtgtctcctttgcttgaatttgcacgatgggtcatcttacagcctccggccccttatttctcggaaagaagccgcaagagcgcttcttcgagaacgctctgcatggtcatgtcatgctcggcggcatagattttcacggcgcgtcgagtacttcgccgcatcttcagagatgtggtctcccacgggtcgtcgctggcatcttcatgcgaatgtcggggttccgccatagtcggactccttacagtagtaatactatactactttactactcactagcgacatcgatatagcgatcagctaaaatgagtcccatgtcgaattatggactgctcggagactacatcgaaaagatcgcgtccaaggagcttcagcgcgtagatgttgatcccgagcgcagcaatcagcatgagataggcggcgtcaccaaggccatgttgccggtcttgggagatgtcgatcgaaaggcttcggatggcaatggcattcccaccgtcgccatgtatctgtccgacgacgataatcctgttacggaagacatctttacgagctggtatgacaccagatgtaataatccggcccgaagcgcggaatggcgcttgtactatcaggcttgcgtgccgatgaggctggcttcagccggtgacactctgtactgcgggtatatgaaggacggacgtctgctattggcgattgcggctgctggcagcagcgtcgatgcagagatgcgttggctcttcggtattaaggatcttgacggcaggttcagtgtatacgaccagacgaaggcatccgtggatgtctttgcgattcaattgctgacgttgcttggtttcgagccgcaacagaaggacgctcttcttctggaagacatgctccacagatggaactacagtttcccaacgggacgcgagttcgcacagtacgcggaggattctctgacggatgtagacccgaaaaccgacaacccggatgaagttgtattggcctattacgagcgcgaataccacttgttcagcgtgctggaggaagccatcatccagcatgagtacgaggcgatgcctttcgtttccaaggatgggaagatagatgtgcctcagttcactaagttctacaagcatgcccgcaatcgacgtgtcagtcgtgccggcaccagccttgaacagcatgtgcagcgcattcttaacgagagaggtgtccgttttacgccgcaagcggtgactgaagagagcaaaaagccggacttccttttccctggcgttgaagaatacgctgatagccgatacccctcttccaaccttcgtatgcttgccctcaagacaagtaccaaggaccggtggcgtcaggtattggacgaggccgacaggatcagtgagaagcacctcttcaccattacgccttctggaatctcgtccaaacagaacaagcagatgatggacaagaatctgcgccttgtcatgccaaagagcattcgagacacgcaccccgaagatgtccagaggaacacgattcttttcaccgacttcatcacagaggtaaaagatctcccgacgttaaaggatctgggcctcgattagcgaagtaaggggttgtcaagcgctctgcgcccgacaaccccttactcttctcactcagacggcaagctcatccttgctaagcttgccgctgaacgcttggttcaccaaggtgtagacggcttgtgcgatgccgatgacgccggtgaggacgatgccccagccgtagccgtggaagccgttggtggcggcgatggcgatgacgccgagcaggatgctcacgccgaggctggtcagtcccacgtagtcggcggggatatacttcttgaacgcctgcaccaaggcgggcaccacgagtgcgacgatgccggcggcgagggtggtcgctgcggaaatatccatgaatcttctccttaggttggtttgggtatggaagcggcggcctccggcacaatgccgaaggccgcagacggacggcacgcgtctagtagcgcagctgctgtccggggtagatcaagttcgggttcctgaggttgttgagctgggcgacgcgctgccagccggaagcgccgaagatgccgctcagcgtctcgccgcttctcacgacgtggatccgcgtgccggtgccagtgttcgccgccggcgtgctgttgctgcggtagatgacggtctggccgggccagatgcggtgaatgttgccggaaggcacgctccatgcggtcgcgggccatagtccggttcgtgcggcgatgccgctgatggtgtcgccggaacgcaccaccatgctgtacccgctgccggcgcccggccgggacggctggggcgtgggctgcggtgccggtgtcggtgccggtgtgacggtggtgttgccggggttggcgtatttgttccactgtgctgtggtgccgcggaagtagttcagattcaatgggcccgcataacctgcgatgcggccgttgctggtgtactggcgcatggcttcgccgtagcgcccgtagttccacggtcgcgtctggtagccggtggcgttgttgttggcgtactgtgcgacctgcaatccgcagtggctgcgcacgtcggctgggatctggtacaggtaggcggcggacgtgtagacgagcggccatacgccggtcctcgcgtggacacggttgacgaagacgcgcacccagttggagttgccccatgcggcgttctgatagccctcccaatcgagcacgaggaccgctcggccgatgtaggggcggacggtgttgagacgaagtagtcggcttcggcggtcgcgttgccgccgcccgcgtaatggtagaagccgaggctcttgccccgctgccgcacgcagttggcctggctggtcatatacccgttggtgaagccggtgtcctgcgtggccttgacgacggcgaagtcgtagtcggcggtgcacgtgacgctcggagactgcacggccggatacgttgatgccgcgcatgtcggccatcgcgctgggcatgacggtgagcatggcgagcagcagcgccattatggcgagtagtcggtgtctggtcttggacatgcctttgtcctctctttatgaggaaagccccaatgcgatggcgtcgcatggggcttcctggtttgctgactaatcggtctgttctgttgttcttcagttatgcggtgcgtggtgtggtcggtagttccagtcgtcggtgtcgagccggtgccggtaatcgtctttgaactgctggcagcgcacgtggccgggcccgttaccaccacgctccgtgtatgccttgccggcgtcgagctggtgttcgtgccgcatccgactcgtggtcggcaggaacagggattgccggtagatctccagttccagtcggcggatggtcgcggactcggctatcgcctgttcaagattccggcgctggccgatacggcgaagcaaccatgagacgagcgaggtgacggcgccgctaccgatgaccgcgcacaggacgagaatcagcggatgcgtagtggtaaggctcatggtcatcccatcgcatgaacgatacaggtgccgattggaatggttacgctttccttcgcaggccaagtgatttcggtggctccggctgctattgcggcgtgtgtggcgctgatttgaatttccttctggtagtcggcagctgcgatgggtatgtaggtaatgctgcagaagccatgctcattcgcagatatcgcgggcacatccccttccaccgtgatcgagaacgtctccccggcaggaatcgtgtagttgctgcggacctgcgcgagtccgagttcaagcgcagtgttcttgatgtcagagaccatcatatttaccgcttttcgggatatgcttccgcatagcacgaagtatgagcggaatcctgtcgtccataggatgtttaattgtccgctaaaaagtcgtggctgttggacggggcgctggatacggtcgagaactgtgccggatgtatgccggaacgcatacccccatctccctacaacgcaaacgccagctcctcccgtagcgcagcacgattcggataacgcccgacaatctcgtgtgccagtacacgggtctcctcatcgccgaacactgcggcgaaacgacgcagctgtttggcgatctgctggtatgtggcgcggcgtgccgtcaatgtattgtcgacgccacgttccaccgtaaaccggaacacgggcgtgcccatggtgccgtatggcatcgcttcgaggattatcgattttgctgattcggggtgttcgatggcgatggtgcgcagcaatggcagcggcgggtatcgaccatgacgcaataggtcagggccgtgtccgaaagccgctcgtccacgatgagcttctcgtaagcgggattgcgccaactgctgtgacgttgtgtgccgcctttggtggttatttccggctggtacttgatacggtcgatgatgttccgggcgcaatctctggccagcccatcagccacgtcatgccattcttctgcgctaagaccgccgtagatgcgtaacagattgcgtagtttactcacgtaatgggtatcggatctgtcgttgcaggaaagaatgtagtaccgatacacgttggcgagcaggccaacgtcattgagtccctcggcgcagcattccatgatggtatgccatccatggggcagcaggtccggcagcagaccgttatgccgggcatcgatatcgacatcttccgtatcccggctcgacagaaggaaaccttgtgcgagcatgtatgcggaacgcaagcgcccttcatgaatcatgttcgcagcgttcatcagcgtgagggccattgactccgggtagtctttcagaagctgctcgcgtccagcgtcatcgttggatagagcgtataggtcgtaggcgctcatgagtgtgaacaactgcaatacgtgtaacgattcatccgaaatgaagtcggtttcgtcgtctacttcgctcgtatcctcgttatcctcatcctcgtcgtcctcttcgctttcttcgctctcttcgttgaatgagtattccagattacgcgttatcgcgttctcgatcacgtcataggcccatatgcgtttgtcgtcatattgggcgaaagcgagcgcgctggaaatcagcaacatactgttcaatggttcgcattgccgcatgtctttgtcgttcgcggcctgtgcaatggtgttcaatgccttgccggcggtaggggagtcggcgaattccgccacattctccatatagcatcgcacgcgcatcgccagatcatctataagcgtgagcaaaggctcggaatcatcgtcgttctcggacgagagcagaagcgcattggtttcgtgtatgcacaatcgcaggttttcgcatgcgctcgcgtaatcactggattgcagggcattgtctgcaatggtctgaacggttttgatgcatccggtgtagtcgtagtacttgctatatgcatttccgtgtttattgtcaagaatgcagatgaagcgttcatgacatcggcggattgcgtcggcgagcatggtttgtgcgtcggtcagcgggatcagtggccgttcttcgcctggttgggcacagaaggtttgtgcggcttcgcgcagttggttggaccacaggaacagcagatggcctttgccttgctccgcgcgagtgccgaggtgttgttggatgggatctagcacggtgtgggggagtgcgatgccgccatcatgagcgttggcggaatcatcattgtggtgattgtcatgcacacctatgagttgtttgcgtagttcgtagagcactgcacctatgtgcttgcaatagggcgttcgctggtatgggcaggtgcacgccgtacgcgaacgtgaccagctcgtgccagtacaacggcagcatgccccagccgatattggaaacgagtagtgcggcaatccccattcgcgtctgttcaacagtacgaaccgaagtcatacccgccaccatagtggtcgattgttcgtgggtccttggctgttcacttgtcatgccgtcgactgattagtgtgatactaactatttgaccatttcagcattcagattgtcatttatgccggaagctctgagcatagtgcactcagagaatatagaccgcactgagaatgcgtgcagagtgcacgcagatggcgttgcgtgcactgacagtgcacccagcgtgtatggcggagagggactcaacggatttgatcggtttttagatacttgggcaatcccgaagatgaagaacatgatggcatggccgagtgggccaaggatcagatgtagaagcgtttcacgctgaaccgccatcgtgagcgtctgttccgttggtgtaggcccgtgacatgatgctgtagtagatggcgtggctacaatatgtgcagctgttagcggaatagccgtttgtagcttgcggactaggggctgaaatgctataaatatattgctttgctcggaaacgagaaaggctccaagtcgccggggggctcccccggcatttttgtcaaaggggacaggggaggatgcgatgctgtctgtattgagcatcttcgctgacgagagcggcgagtggggtaaacgatcagaatattatttaattactcttgtctttcatgaccagtctaaggacattagtcttgccttagagcggtaccgccagtcgttggctgactatggacttcctgatgttcctttccatgctgggccgctgcttaccgggcacgatgcttatgaagggatgagcctatcggagcgtaagaggcttctgggtttattcgttatcatgactcggcggctgccgattacatatcggacgtttgtgcatcgtaaaagcgattttgacgataaccgccaacgttttgaagcgcaactcaaacgcgatattgttaatctacttttggagcatctttcagatttccattcttatggcactgtcaaggtgtattacgacggtggccaacagatagttactgatgccttgcgaggcgggattgagtatgcactctcaaaagatgccattgtctatcgtgacgcttctccacgcgactaccggcttgaacaagttgcggattttctatgcacccttgaattgacctgtgagaaattccggaatggggaacaaactgaaacggacaacaagttttttggtgattggaaatccttcagagccaattatcttaagccgatccgcaggaaaagattggaatcataaatttggcagtgcccatatattcgggatacaattgaataacgctaaatagcaaacaaaatccccggacctacacaatcatcgccacaacaatcgcagaaaataccgctacggcaatcagtggtgcggtgccgtcgatgaaggcgggcatgggtggcagatggtagtaggcgaggtggcaggccatgtcggcgatgagcaaaatcagcaggatgatggccaaaacgatggcggcggttgccccgagagctccggaactgtgcaacatagtcagcgcacatagttccagcgtgatccacatgacgatgagcaacagttccgtggtaatcggccgttgcaacagtcgcgaagtaagcacggccagaatgacatagacggcaacaccgccgaccgcgaaccgctgaatccgccgatttcgccgagttcaccggccctattaggtccctcaactccatcaatcgccgtctgccccttcacatcacgctttcatacacattgccgattgacagtcctagaacacagtctaggactgtcatggcatgttcgcgcagataggggctccaacaaaattgactaaaagagaactctgcgacttatcaaggactcgcccgtgtgcccttaccgttcagctccgctcacgaatgaaatcgaagatcgcgtcgaagacctgctggctccagaaatcgtactcatgttcggcgccgtcgactagcaccagttgtgcgtccacgccgtgctcgaccagccggtcgcgcatcttgacggattgatggtaggggaccacggtgtcggcggtaccgtgcaacaggagcatcggcggatactgctggtcatcccgcacctgcaggtaggggctcatgtcagccgcgcgctgacggacctcggcattgatgccggtctcatgggtcgcgcccaccacggccgcgaacgggccgaaataatacagccggaatggattggtctcatcgtcgaatgcgtcgacagcttcaagcatgtcggtgggcgggaagcaactgaccacgtacttcaccgcatcgctctcatcggcattggtgccgtcctcataccgcggatcgtcggcggtcaaccccaccagcagcgacgtgttgccgccggacgacgtgccccagatgccgagacggtcggggtccacgtgccattgacgcgcgtttgccctgagatagcggatggctgctttgacgtcctcgagatatgcggggaacacgtcgtggggatcgctcgaagcgtcgcgatgattcaccgtggccaccacgaagccttcgcgggccaaagccgagagctgcgggatctcgtagtcgcgatgcggcgtggtccaggcgctgccttgcacgaataccacggtggggtagcggcggtcatcgtcatcgccggtggattgtggtgagatgatatccatcaccagattatcggccccggtcttgtacgccacgttgcgggtcagtgtggccaatccggcaagcgtgggattgtgcgggatatggatggcattgtttgcgtcggcgttggcatcggtgactttggctgaatcggtagtgttcatggaatccccccccctagctttgttgctatagaggtcatcatacaaggaatgggcatgattacgacacaacgatgtctcgatcacagcggagacgcgaagacgcgcccggcagcgcgcgctgcctgcctgcgagttgccttcaagtgcacttcaagcgataaggtgacataaaaagcggcaatggagattgctgcccggcaacgaggcggacagtgcccgttcgccgattcacgataacaggaatgagacattatgaagactcaggaaatcggacaatccggcatgattgcgtcacgagtggcgctgggcgtgatgcgcatggacgcgctggatgccgccgatgcggcacgtaccgtggccgcggcccatgattccggcatcgactatttcgacacggcggacatctatggattccatgatcatgccgcgcacgccagttcgaagcgtttcggccaagcgtggaaggacgcaggactcgaccgcagcaccatcttcatccaaaccaagttcggcatcgactacagtttcggcgaaaacgatggcggcgccaacggatatgacttcagcgccaagcatctgattgacgcactcgatcacgagcttgaggctttgcagacggattacgtcgacgccgtgctgctgcaccgtattgacacgctgtttgagttgaacgaggtcgccgaagcattcgacgcgttggaatcaagcggtaaagtgcgtcatttcggagtcagcaatatgggcccgtggcagatcgaactattgcaaagcggccttcgtcagaaattggaaatcaaccaactgcagttcggcctgatgcatacacagatgctcgacgctgaaatccaattcaatatggcgagcgatcccgcagccgatcgcaccggcggcatcctgccttattcacggctgaagcatatgaccattcaggcatggtgcccattccaatccggcacggaatacggtccgttcgtcggcaacgagcatttccccgagctgaacgccgaattgacccgtcttgccggcaaatacggttccacgcccaacggcattgccgtcgcttggattctgcgtcatcccgccggtatccagccgttgctcggctcaatgacaccggagcgcatccgccagatggcggccggtgccgatatcgaactcgaacgccgtgactggtggtcgctgtatcaggcagccggcaatccgttggtgtgagcgagagatgacgagaccactgccgttgaggcgcgtgttcagcgtgcatacatctcaacggcagtcaatgctgtgtcaatccacccacgacgagaacaacgacacgaacattccgcgaatcacatcagaacgacggcatatcgagcgagggaactgaatcatcggccttactggtcccgttcgcgggcgagccgacatcgtgattgtggaaccactcgacaacccgtgtttcactcatcggcatcaaatcccaagcatccaagccaacattcagtgcctccgggcgtgcaccaccgagtccctcaatctcaaccgtatcgtgcggctccaaactttcgaacaggttaagtgcggggcggtcttccaaccaccagtcgtgaaatacctcatgacagtcgccttcccttttcggcgtgcagcaatcgtttcccatcctaggcgcagccggcacctgtcggttcgtgttgccataatgaggcgcattgcaggggaaccagtgaacgcaagctgccagccatcgtgacggcgaacgggttgagaaaggcgctgtgcctgacccttggaacctgttggccaacaccatcgaagggagcaaacgatgtcttttgacgccgccgcattcggcccgatcaccttgaaccacctgccgccgttcgcccagcgcctacgacatgcagtacacgtggaaacccgaatgggacgtgtgaggcgcacgatggatgagcggtgggcgcgtgctttgcgtgccaagggcattgatattgacgaggctgacggtgctggtgggaaacaggcacacgacggcaaacggcataccgacatcacgggtactggtcgacgccccgagtcccagccggctgccgggctccgcggtcgatccaataccagtacgaatctgccggggccgaaggtgacggcacgcgccacgccattcaaggccaccggtcataagggcggcatcagccggcaggggaattgagctgatcgcagaaccatcgcgcgatgaatgggcgcggccaacgccattccgccattgttgagccgcttctacttggaccggtacctctttgaacggagatatcattccgcaaaaggtcgaatgtacctctttgaacggagatattccatattgaagctattccggcatcatatggtacgtaggaaatcccggatatcggcgatttcctcatcacagatggcatgggccatgccggaatactcgcgataggtcagatgtccggcccgttcaaggacctgatgggccgtttgctggtcgggcagcggaatcgtgcggtcctgcgcgccatacgccaggaagaatcgggtaggggagtcaagcgccgcctgttcctcgcccatgaacgaaggactgagcaggatcgcggcatcgaacaacgtcggatgcaccttgaccagacgatacgacagataaccgccttgggagaaaccgatcaatatcttcctgcgatgggcgaatgccgaggcatccagcagtgaagccaccgcatccccgaccgccgcgcattcgcgttggcgctcgtccacgccgcagccgtcgggataccagtaattgccgcccatatagggcctcgcgtaggtggcgcggaacgagatatagctgggtacggcggcaattgcggccggggccgcatcggctcgcgtcggcgcatatacggcgtcgagaatccgcatcatctcgctttcgtcgttgccgtaaccgtggaacatcaggaaaatggggtcattgccgccggcatcgatctggcttgtcatctgcattcgcatcgtcatcacctcaccagcgagcttacatgcattagacttgtagcgattgacccaccgagcacgcaaggagcaagttatggagccgaggcgcgggcctctcaccgcaggcgagaaagtgcagttcaccgaccgcaagggcaagaagatcaccgatcagcttgtggccggcggctccacgcagaccgagcatggcctgattctgcatgacgatgtgattggcaagatcgaaggcaccgtaatcctcaccgtgcatgccaagcgcgaggcacaggtcaatcaggtctaccccgagaaagacaagaacaagccgtggaaatcgtcgcgcgccatcggcggctgggagtatgcggtgatgcgcccgcgactggccgattatgtgctttcgatgccgcgcggcgcgcagatcatgtatccgaaggacatcgcccaagttattcagctcggcgacatccgctccggcatgcgcgtgcttgagtccggtgccggctcgggcgcgatgagcgtgaacctgctggacgccgtgggcgagcgcggccacctgaccacgatcgagctgcgccccgaattcgccaaggtcgcccaagccaatgccacgctgtactatggcgaggcccccagctggtgggatctcaaaaccggcgacttcgattccgttgccgccgaactgcccgaacactggttcgaccgcatcatgctcgacatgctcgacccgtggaacaggctcgagcaggcataccgcgtgattgcccccggcggcgtgttggtcagttacgtaactaccaccacgcagatgagccgcatggccgaagccctgcgcgcggccggctgctggaccgagccgcagatccaggaatcgttcgaacgcacatggaaggcccagggcctcgccgtacgccccgaccaccagatgatcggtcataccggtttccttgttatctcgcgcgccatggcctccgggttcgaggcgctcagaaagcgcgatcgcgtgaccaaggacacacagaccgacatcgactcgctcaccgacgaacagcgtgaagcgcagatcgaggaactggaactgcgcgacatctccgaccacaaactacgtaaggtgttgcgcgacctcgaccgtcaggtgggagaacttggcaatacgcacgaataaccgccaaacgatgagtttgtgaacgctcacacacctctatactggaagcaataccacaccgccacaccgccacaccgggcagacggttcgtgaagggagccacggatgggcatcaagctgagtaaagtcgccaaagcggcgaagaaatacgaccatattctcatcatcatgaggcatgccaaggctgagccgttcggcgacaagggtgactcggagcgcgagctcaccgacaaaggtctgaaacaggcgaaggccgtgggcaagggcatcgagtcgttgggactggtgcccgaccaaatctcctgctcgtccgttacccgcacgcgccagacgttggaccgcatgctcaagacctttggcgacaagccaatcgtcgactaccgcatcagcctgtatgacgggggagtgcaggcggtgttcgacgagctcgcccacgtcaaggccaagaatcgcgtgttcatgatcgtgggccacgagccgactgtgtcgatcagcgcccaatggctcgcctccgccgactccgacggcgaacgactcgacctgctgaatttgggactttcgcccgcatccatcgtgatcatgggatcgaacaaaccgttcgacgaatggcaggtgcacagcggcgaactgctcgcggtcatcaatgtgaaagacttcgactaaagcggatataaattccatctataacgacactctgcggccatttataagggccggaatccggatgttttgctaccctaagtcgggttacgaacgcatacattggaggattcatgtccactctgacttccgtctccggcttcccccgcatcgggcagaaccgcgaactgaagaagatcatcgaaggctactggaagggtgccaacgacctcgccgccgtcaaggccaccgccgccgaactgcgcgccaagcactggaagctgcagcaggccgccggcatcgacctcattcccagcaacgacttcagctactacgatcagatgctggacaccgccatccttctcaacgtgattccgcagcgttacgcacgtctctccttcgacaaccaggaggacacgctcttcgccatggcccgcggctatcagggcgacaagggcgacgtgaccgccctgccgatgaagaagtggttcaccaccaactaccactatctggtgcccgaagtcgagtcggccgcggagatcaagctcaactccaccaagccgttcgacgagttcaacgaggccaaggcgctgggcatcgacaccaagcccgtgttcatcggcccgtacacgttcctgaagctcgcccgtaccccggaagccaccgaactcgagctcgacaagggcctggtcaacgccgtggccgccgtctacgtcgaagtgctcgccaagttcaacgagctcggcgccgcatgggtccagctcgacgagccgtacctcgtgctcgacaaggagccgggcgacgttgaactcttcaagaccctgtacaccaagatcctgtccgccaagggcaatgtcaaggtgctgctcaacacctacttcggccacatcgccgacgtgtacgagaccgtcaacctgctcggcttcgacggcatcggcctggacctcaacgaaggtcgcgaggagaacctcgaagccgtcgccaagtatggcgtggcctccaacaccaccatcttcgccggcgtgatcaacggccgcaacatctggcgcaacaactacgccacctccctcggcctggtcgacgccctgaagcaggtcaccgccaacgtggccgtctccaccgcatcctccctgctgcacgtgccgttcagcaccgaaggcgagaccggcatcccggccgaagacctcaagcacttcgcgttcgccgtccagaagctcgacgagctcaaggaagtcgccgccctggccgacgccaccgaggacgagaagaaggcatccgccgccctcgccgccaaccaggctctgttcgacggcacccgcgtggccgccgacccggccgtcgccgagcgcatcggcaagctgtccgacgccgactacgtgcgtcagcctgcccgcgaggagcgtcaggccctgcagcgcgaggccctcggcctgccgctgctgccgaccaccaccatcggctccttcccccagaccaaggagattcgcgccgagcgtgccaagctgcgcaagggcgaggtcaccaaggaagcctacgacgagttcatcaaagcccagattgacgccgtcatcaagaagcaggaggagatcggcctcgacgtgctggtccacggcgagttcgagcgtaacgacatggtcgaatatttcggccagaacctcaacggcttcctgttcaccaagaacgcttgggtccagtcctacggcacccgttgcgtcaagcccccgatcgtctggggcgacgtttcccgcgccaacccgattaccgtggaatggtccgcgtacgcccagtccaagaccgaccatgtgatgaagggcatgctcaccggcccggtgaccatcctcaactggtcctggccgcgcgaggacatcacccacgaggagcagaccaagcagctcgccctcgccatccgcgacgaagtgctcgatctcgaggccgccggtatcaaggtcatccagatcgatgaggccgccctgcgtgagaagctgccgctgcgcaagtccgactggcacgtcaagtacctcgactgggccgttccggccttccgtctggtgcactccgccgtcaagccgaccacccagatccacacccacatgtgctactccgagttcaacgacatcatccgcgacatcgacgcgatggatgccgacgtgatctccttcgaagcctcccgtggcgatctggtggtgctcgacgccattcatgacgcgcacttcgagaccgaggccggcccgggcgtctacgacattcactccccgcgtattccttccgagaaggagatcgaggatcgtatctacgagatccttgacaagatggacgtcaagaaggtgtggatcaaccctgactgcggtctgaagacccgcggtaacgccgagacctggccgagcctggagaacctggtcgccgccgccaaggccgtgcgcgccaagctcgacaagtagcggaaatcaccgagctccctctggatgagggagctcgggtttatgtaaggaaatcagcatgcattccccgatgttcacccttgaggtctttcccccgaagcgcaacgcgcctgtcggcaccatctacgacaccctcgacggactcgaagggctgaaccccgacttcatctccgtgacctacggtcacggcacccattccgaccgcaccgccaccgcgcgcatcgcccacacgatcagcaaggaatacggcatccctgcagtcgcccacctgaccgcgctctactccgacaaggccaagatcgatgaggctctcgacatgttcgaggaagccggcgtgagcgccgtgctcgcgctgcgcggcgactacatcgacggcgagcagctggtcggcgagttcaaccacgccagcgacctcgtgtcatacatccgctccgtgaagccggacttcaaggtgtttggtgcttgctacccggaaggccactatcaggctgactcgctggaccaggacatcgaaaacctcaaaatcaaggttgatgccggcgtcactcacctgatttcccagctcttctacgacaatgaggacttctaccgcttcctcgacaaggcgcgcgccgccggcatcaccgtgccgatcgaggcgggcatcatgccggtgcgtggagccaagtccgtgcgtcgcatggccgagcgcaacgcctcgcgcatcccggacaggctcaacaccctgctgaacaagtggggggacgacatccagtccctgcgtgccgccggcatcctctacgcttccgagcagatcgccgacctcgtggcccacgacgtggacggcgtccacctgtattcgatgaaccaccccgccaccacgcgccgtatctggcgcaatgcggaaccgttgttccgcggtacgcaaggttgacgcatatcgcggcgcggcgcatctcaatgcgtcgcgccgcacgttaatctgctggcgaaacccagagttctcccagcggccgatgggtatcatgaacgtgcaagccaaccaaagcgatggaagggagtccgttatgtgcactggtgtccgtttctccgatgatgagggcaacacctatttcggccgtaatctcgactggagtttctcatatggggagaccatcctggttactccgcgcggctaccactatgacacggtgtttggtgcgggcggcaaggcgaagccgaacgcggtgatcggcgtgggtgtggtcatggccgataggccgatgtatttcgactgcgccaatgaacatggtctggccatcgccggcttgaatttccccggctacgcctcgttcgtccacgaaccggtcgaaggcacggaaaacgtcgccacgttcgaatttccgctgtgggtggcgcgtaatttcgactccgtcgacgaggtcgaggagacgctcaggaacgtgacgctcgtctcccagatcgtgccgggacagcaggagtctctgctgcactggttcatcggcgacggcaagcgcagcatcgtcgtcgagcagatggccgatggcatgcacgtgcatcatgatgacgtcgatgtgctgaccaatcagccgacgttcgacttccatatggaaaacctgcgcaactacatgtgcgtcagcaacgagatggccgaaccgacttcatggggcaaggcctccttgaccgcctggggtgcgggtgtgggcatgcatggcatcccgggcgacgtgagttccccgtcgcgcttcgttcgtgtggcctacaccaacgcgcattacccgcagcagaacgatgaagccgccaatgtgtcgcgcctgttccacaccctcggctccgtgcagatggtggacggcatggcgaagatgggcgacggccagttcgaacgcacgctgttcaccagcggatattcgtccaagaccaacacctattacatgaacacctatgatgaccccgccatccgttcctacgccatggccgattacgatatggattcctcggagctcatcagcgtcgcccgatgactccttcccggctcatgccccattcggagggcatgagcgtatatagtggaatcttatggaatcgtcgatcttcaaacccagctccatggacctcatcagggcaggtctgcaagacctcgacaaggcccgcgccttgttcgaccagctcaaggcggacgacattcccgatgagcgatgcgccgaactgctgagcgcgctggcccacgcctgcgaccccgatatggcattgagcaatttcgtggatatcgtcaacgcgatgcaatccagccagcgcgatctggaacacgtcatccccgacaacgacgccctgaagcgtctggtcacggtgctcggcgtctccgacgcgatgggcaagttcatgcgcttcaagccgcagcttgtggaggcggcagcagtcgacaactgcaacagccatctgttcaatcacgcgcaacgccgtgcacgtctgctcaaggcggtcggcgcggacccggacgaaccggccatgcccgtcgcctccaaggatctggccgaagcggccacggccctgcgttccagctaccggaaccaactggccgccatcatcgcccaggatgccgtggcggacgacccgacctccatccaaccgaccatcagccgcgaactgtccgacctcgcggacgcggcgctcgaaggcgcgctggccatcgcccgccacgaaaccgagggcagcgagcacgtgcgcttcaccatcatcggcatgggcaaactcggcgcacaggaactgaactacgtctccgacgtggacctcatctacgtggtcgaaccggccgacaaggatgtggaccatcagacgctgattcgcgtgggcaccaagatgggcaccatgttacagcgcgtctgccagtccgccatcatgggcgtggccgagcagccgctgtggcagatcgacggcggcctgcgcccggaaggcaaggacggcgcgctggtgcgcgtgctctcctcgcacaagaactattacgagcagtgggccgagaattgggagttccaagcgctgctcaaggcccgcccggtggccggcgaccccgacctcggtcaggcctacatggacatgacccggccgttcgtgtggagcgcatccaagcgcaagaacttcgtctacgactgccagaaaatgcgcaagcgcgtggaggatttgattcccgcgcccctgaaggaccgcgagattaagctcggccgcggcggtctgcgcgatgtggaattcaccgtgcagatgctccagctcgtacacggccgcaccgacgaatcgctgcgcaccagcaacacgctcgactcgctgcagcgcctgtccgaaggcggctatgtctcgcgcaagcaggccgtgcgcatgtcccaggactaccgcttcgagcgcgtgatggaacatcgccagcagatctggtccctgaagcgcacgcacctgttcccggatctcggccgggcctcggtcggaggcctcgaaaagaagcgcgacatcgacgtggacgagctcaaccagaaccaggagctgcgccgactcgcccgcgcattcggcctgcacccggaagaactcgtcgacaagtacgacgacacccgccgcgaagtacgccacctgcacctcgacatctactatcgcccgatgctgccggtcaacgcccagatggagaacgaccagatcgtcctgagcgtcgaggcagcacaggaacgattcgaatccatcggtttcggcgacccggacgccgccatccgccacgtgcaggcgctcaccgccggcgtggggcgcgcggccaaaatcaaccgcatcattctgcccgccgtcttgcagtggctgggcgagggccagaacccggacatgggcctgctcaactggcgcaaactggaggagaacttcggcaccgaatccggctacctcggcttcctgcgcgactccacctccgccgcccagcgcctgtgccacatcctgtccaactcacgattcctgggcgacgcgctcaacaagtcggtcgaatcgatcagctggcttggcgacgacgacaatctgcaggcccgcacgcgcgaggccttggacgtgcagaccggctcggcgctggaacgtttcggctcgaacatcaacgagttcgccacctccatgcgcgccatgcgccgccacgaaatcgaacgcatcggcctgtcttggatgagcggtgtgatcagcgactccgacagtctcaaggccatgaccgacgtgtatgacgcgatcatcgatgcctccctgacctgggccgtgcgccaccagatcgccgagttcggcgtcgaaaccgcgccggccggcatcaccgtcatcgccatgggccgttacggcgggcgcgaagtgaacttcagctccgatgcggatgccattctcatctaccgtccggccgacgatgccgacgacggccaagccaacgccttcgccaagaaggtcgtggaagacctgcgcaacatcctgcaaggaccgacgacgctggaactcaagatcgaactcgacctggacctgcgcccggaaggcaagaacggcccgctcgtgcgctcctatgcctcctgcgaggaatactacgaatcctgggcttcgacctgggagcgccaggcgctgctgcgcgcccggtacgcggccggcgacgctgaactggcgcgggacttcctgatcaacatcgccgacccgctgcgctacccgaccacggaactgattgaagcagaattacagaacatccacaagctcaaggcccgcatggaagccgagcgtctgccgcgcggcgtgcgccgtgaacggcatctgaagctcggcaagggcggcttgtctgacgtggaatggaccgtgcaactcatgcagctccagcacgccggcgatatcaaagatctgcgcgtcaacggcacgctggaggcattggacgtgctggaagccaagaagctcatcagcgctatcgacgcgattcagctgcgcaaggcatggacgttgtgcaccgcggcccgcaacggcagctatctgtggagcgggcgcgccaaccaggccgatattctgcctgatgacatctattcgctgggcggcatcgccgtctacctcggctacggcgcccaccgcggccagcatttcgagaacgacctgctggccgtgatgcgcaaatgccgtgacgtatgccagcgcttgttctatgggaagaccgaaggcgaggcggctgcggcaaccaccgccacggcctccgccgcaacgcagcagccgcaaaccgcccctcgcccgcgtatgcacgtgatcgcaccgcgactggaacgaaatcgacgccgcgcgcagcgataaggcagcatattcgttggattttcaggtggacactcggtgaatgcggctgtccgaaaaatggcgtaagttagattaggtcacgcaagggtggccacctgaaaaccacgagcgaaaaggtgagccttgtctgaagaaacgccaatggtcggcaaaagcgtcgtaacgctggacggcctgtctacaaaccagattctcgacctgctgcataaggccgaatacatcgattcccaccgcaaagagattgcccatacctgcgatgggcgagtgctggccacgctgttctacgagccctccacccgtacgcgcctgagctttgagaccgcaatgctacgtctcggcggcaaggtcatcggattcgccggcgcgcagctggcctccgtgaccaagggcgaatccatcgccgacacgttgaagaccgtgtccaactacgtggacgtggtcgccatccgtcacccgaaggagggtgccgcgctggtggcctcccgcgccgcatccgtgccggtaatcaacgccggcgacggcggccacatgcaccccacgcagacgctggccgacctggccacgctgcagtcgcgcttcggccgcatcaccgacctgaccgtgggactgtgcggcgatttgaccttcggccgcaccgtgcactccctgatcgagaccctgtgccgcttcggcaacgtgcgcttcgtgctcatcagcccggacgagctcaagaccccgcagtacgtgatcgaccgcatcaacgccaccgacagctgctcctacgtggaagtgcgcgacctggcctccgtgatcggcgacctcgacgtgctgtacatgacccgcgtacagaaggaacgcttcttcaacgaagacgactacctgcgcctgcgcgacacctacattctcgacgaagagaagctgcagctcgccaagccgtccatggccgtgcttcacccgctgccgcgcgtcaacgaaatcgccgtggacgtggacgacgacccgcgtgccgcctacttcgaacaggtcaagaacggcatgctcgtgcgcatggccctcgaaagcaccgtggtgggcgacgaactgcccggatacgaaccgctcaaccccaaggaggttcaggcctgatggaagtcaccagcattcagaacggcatcattatcgaccatgtgccggccggaacctcgctgaaggttctcgaatacctgaaaatcgacccggccaaaaccaagcttgcgctcatcatgaacgccgactccaagcgttacggctccaaggacatcatcaaaatcgaagatgacaaggacatcgacctcgacgtgctcggcttcgtggcccgccaagccaccgtggacgtggtgcgcggcggcaagatcgtcgaaaagaagcagccgaacctgcccgagcacatcgtcggcgtgatttcctgcgtgaacccgcgctgcgtgaccaccgccgagcccggcatcaagcagatgttccacctcgtgcactccgagcggctcgaataccgctgcgactactgcgacgaggaagccaaactgtgagcatcaccctacgcaacatcaaggtctggaacaccggcgaggtcatcgacctcgtggtgcccgggaccgctgccgcctacttcgccgacacctccgccgtggctgacggcgccgacatcgacgccaccggcctgaccgtggcccccggtttcgaagacccacacgtccacttccgcgatcccggccagacctacaaggaatcgatggtctccggctgccgtgcgtccgcatccggcggatacacgaacgtgctcatcatgccgaacacgttgccggcactggatgggcagaccgtgtctggcccggaagcgaccggtgcaaaagaggttctggatgccggcttcgacaacgtcatcgacttcctgcagcagtacgatactgcgcatgacgttcaattgccggttcgttacgatctgtgcgtgtgcgcgtccaaggatcgcgccggtcatgaggcaagcgacgttgccgattggctcaagtacgtgcccggattcgaggacgacgccaagacgccggccatgctcacgcaccccatcaccgcaatcagcgacgacggttccgctgtgacgccggagatcctggaccaggtgctggagaacgtcaaggcctccgacctgtacctgatcgagcattgcgagcatcacgatacaggtgccgtgaacgaaggccccgtttcccgcgagcttggcgtgcccggcattccggaagacaccgagctcaagatcgtggcccgcgatatcgaagcggcccgccgcaccggtgtccacgtgcacttccagcatgtgagcactgccatctcgttcgaggcgattcgcagggccaaggccgaaggactgccgattacctgcgagaccgcgccgcactatctggcgttgagcgacgaggcgctgctcaagtacggcacgctcgccaagatgaatccgccactgcgctccgaagcggaccgcaaagccaccatcgcggccatcgccgacggcaccgtggatctgctggccaccgaccatgcgccgcacacgttggcagagaaggaactcggcttccttgaggcgcccaacggcatcatcggactggaatgcgcgtacggcgtgtgccacaaggtgctcgtcgacggcggcttcatttccgatgagcgtctgatcgagctcatgtccgttggacctgccgaactcatggggcatgtgccaaccgacgtagccgcgctggtcgaggactacgccgaacccgcgcccaccggggatgatccggatggcgtgattgcgggggagagcgacgctcagccgcagcgtgaaggcgtcaaccgactgctcgacttgagccgcgtggatgacgccgacaatgtcgacctcgtggtgctcaacgccgccgaggaatggaccgtggaccccgaacagttccactccaaggctcgtaacaccccgttcggcggctggcaggtcaccggacgccccctcgccacaatcatcggctcccagctgatgttcagccgtctgtagataacacaaggagcagcatggatcgcctgatcgaagcgattgacaacactcagaaccccagcgtcgtgggccttgaccccactgaggcgctggtgccgccgcaggtcgtggcgagctttgccgacgaggtgcgtgactcggtcgaatccccggaggaagtcgaatccgcgcagctggccgtcgcctacttcgaatacaaccgcacgatcattgacgccatcgccgacatcgtgcccgccgtcaaaccgcagatcgccatgtacgaggcgctcggccccgccggcgtggacatctacacgatgacctgcgaatacgcggcccagcagggcctctacgtgctcggcgacatcaagcgtggcgacatcggctccaccgcagccgcctacgcccaccacctgaacggcgtgggcgacttcgacccgtggcatgaggatgcggtgaccgtcaacccgtatctcggcaccgacggcatcaccccgttcgtcgaggccgccgccgaagccgacaaggacatcttcgtgctcgtgcgcacctccaacccgtcctccagcgaactgcagatgctcgacctggccgacggcacgaaggtctacgagcacgtggccgatcttgtggaaggatggggcgccgagaccatcggcagccacggctactcccgcgtgggcgcggtggtcggcgccacccaccccgaggaaggcaaggcgttgcgtgaacgtatgccgcacacgttcttcctcgtgccgggctacggtgcgcagggcggcacggccgcggacgtggcaggcatgttcgacaagcagggcagcggcgccatcgtcaactcgtcgcgcggcattatcggcgcatggaagaagagcggcaagtactccgaatccatgaccgccgacgaggcgctggaccttgtggcgagcagcgcgcgccaggcggcgctcgacatgcgcgataatctgcgggttgccgtatataggtaggtagattgtccggctgtgggctatacgtgagtgtgggctggaaaccggagccgagtgtgtttaactacctctcagtcaacctgcggttgaccgctcccctgatagggggagcttgatgtgctgaataggaatgaaatgacaactttcacccccacccatgatgtggttacggaagcgactgcggccggattcttcccgccgcgccacaacgtcgaaatcacgcaggttacggaactgaccgaccgcgtgatgcgactgacgttccgcgacccgttcatcgcctcccatgccaagcccgcccagttcgtcaacctgttcacgcacgacgacttcatgctcatgccgcgtccgttcggcgtcagcgaagtcgacggcgacgaagtcagcgtgatcttcgccgtcgtgggacacggcaccgaacagttggcaggactgcaggccggcgacaccgtcgacgtgctcggcccgctcggccgcggcttcaacctcaaggaagacgccaactacattcttgtcggcggcggactcggcgtgcccccgctaatctacgccgcgcaaaagctcgccgaacacgacgcctcctttgccaccgccgtattcggttaccgcaacgaccacttcgccgaggaatacgtctcccggtacgcggactggtcgtggagcatcgacgacgccgaaggcaacgtggtcgacctgctcaacaaactggaacaaggcgacgacctgaaggcctacgatcgcaagccgatcattctgtcctgcggaccgctgcctatgatgaaggccgtggccgactgggccgccgaacgcggcatccccgcgcagctgagcatggaacagcgcatgggctgcggctatggcacctgcgtgctgtgcaccatcgacaccgtggacggccgcctcaaggtctgctccgacggacccgtgttcacccgcgaacagctcggatgggggaagtgacgatgagcgcaaacaaccagtccgcgcagggcggcgacaaccacatcaacctgtacgagccccacgtgtggaagcaccacaccaaggtggccggtctggaatggaagaatccggtcggcaccgcctccggcaccttccagtacgccgccgtccgctggttctacgacgtcagccagctcggtgccgtatgcaccaagggcgcctcgcccgtaccgtgggaaggcaatccctcgccgcgcaccgccgaatcgccggccgcgaacatcaacgccgtgggcctgcagaatcccggcatcgaccattacttggccgaggacctgcccaagctcaaggccgcgggcgcgttcgtcatctccaatgtcgccggacattgcgatgacgattacgcggcggtcgtggaaaagctcgccgactccgacgcggacatgctggaaatcaacgtcagctgcccgaacgtttccgccggcggcatgagcgtgggcaccgacccggtggccctcgccaatcttatggaccggctgcgcccgatgaccgacaagccgatgatcgtcaaactcacgccgaacgtcaccgacatcaccgtgccggcgcgcgcggccgtggaacatggcgccgacgcgttgagcatgatcaacacgctcaaaggcatgcgcattaacattcgcaccggcaagccgatcatcgccaacgtcaccggcggcgtatccggcccggccgtgctgccggtcggcctggcagccgtctatcgggtgcgcaccgcactgccggagattccgatcatcggcctcggcggcatcgacagcggcgagaaggcgctcgaatacctgtacgccggcgcgaacgccgtcgaagtgggtgcggccgcgctcttcgacccggtggccccgctgcgcgtcgcccgcgaactcgacgacctgttggacagccgtcccgaactcgctgctaaactggccgcaggacagacttggaggtaaggaacatcatggcagaaacactcgcacatcgcttcactgaattcctgttggaatccaacgcgctgaagttcggcgacttcacgctgaagtccggccgcaagagcccgtacttcatcaacgccggcgccttcgacgacggcaagaagatcgccgcgctcggcgcgttctacgccgaaaagattagccaggccatcgtgcacaacacgattccccgcaacatcgacaccgtgttcggccccgcctacaagggcattccgctggccgtgtccaccgcgatcgcgctgaccgccggccacaacatgaccgtcggatacaccttcgaccgcaaggagaagaaggaccacggcgacggcggctggatggttggcaccccgctgaccgacggcatgaaggtgctgctcgtggacgacgtgatgaccgccggcaccgccgtgcgcgaagtcatccccaaactcaaggccgaggcgaacgtcgaggtcgtgggtctcgtgctctccgtggaccgcatggagaagaccaaggactccgacatgtccgccgtgaaggccgtggaagccgaattcggcttcccggtgctctccatcgccaacgtgcgcgagatcttcgacgccgccgccaagatgaagaaccccgacggcaccccgctgctcagccacgacatccagcagcgcgccgccgcctaccttgaggaatacggcgcctgatcgtcttcaatctaaaaaccaaaagcgggcttgcgagcccgctttttttattacgttccatgaacagcagcaccatattaaggcaaaagctttggcaaggagcgtgctatgaactggttagttgatatagggctgtttgcgctcgtggggatatgcagttacttcggcatcgagcatcatctggacagcaaagcgaacaagttgtcgcaaggtaatgaagaagaccgccgagatgctgatgcccaagtagaagcagcatgaaaatggcggaatgacgttgggatgacgccgctcatactcgggatatgacggatgaacagcctcttgaaacggagataaatgtctccagaaggccaaatcagctcccttgaaagcgagatagggttctaaactctgggaccgactcgcctgtgatgaaaacccgctcggcgtagaattaccgtaggttcgttgcattcgaacaaggaaggccgctatggggaacatcaccgacgatattcggcaacatttcgacactttcgccgaactgccgttcaccgaggcggatagcctcgctttgtcccagttggcctatgctcgcatgccggataacgtgccgcgctatcacgagaatgcagagaccgccgacggcatgatcgccacggttccgattcacgatttgctgcgtgccgaatgctatgacgacatgttcggcaaggtgtggtcgccttcgatgaatgtcgatctgttacgtgcgatgagcgagagcccacgttggaggaacctacgcgtgggcgcatacgtggacgaattcgatgctgcaaccaccaagcagttctcggcctgcgtgttcgaactgggtaacggcacgctctatgtggcttttcgcggtaccgacagctcaatcgtcgggtggaaagaggacttcatgatggcgttccgccgcccggtcgcctcgcaggaggccgccgcgcgttatctgaccgagctggctggccattgggccgggccgattatggtcggcggccattccaaaggcggcaatctggcggtgtatgcggcggccaatgtgcctagcgagattcaggaacgtatcacggtcgtatattcgcacgatgggcctggattcgatgaggcgttcttcgatgaggacgggtacgtacgcattgcgtcgaagatccataaatcggtaccgggctcgtcgatcatcggcatgctgtttgagactcgtgagcatgtggaagacggctatacggtggtcagcagcgacggtgccagcatcatgcagcatttcgcattgcactggcaagtcgatcatggccaattcgtacaggctgatggactgacaagtagcgcgcaatacctggcacgcacgatcaacggatggatggcaaaatacgacgacgagcatcgccgcaagttcatcgaaaacctgtttgccatcttcgaggctggcggatacgacacattcggcgacctcacttcgcatttgacacagtcactgccgattatgctcgccgcggcccgcaacattgatgtcgaagatcgcgacgtgatgattgaagtgctcaaaggcttcgccgcgacagccgccgcgtcggtaatcttggccaagtagtcggaggccatcaaactggttttgccagtcagtctcaatagcgcaaaagccggcccctgagatactcaggagccggcccttacttccatttccccagcggggttggcttaatcgcagtatatctcactgctgaccatgcctgttttacttactcctaatcaatgagcttgtagccgtggtcggagactacggacttgagcttgtcgagataggtttcggcggccttggagagcttggaacgctcgttcgtgatccagccgaccaacatcgtttcgtcggtgtcgagcggcacggtgacgatcttctcgttgttgaggtcgccgttgtcgatgccggtgcacaccgtgtagccgttgaggccgatgatgaagttcaggatcgtggcgcggtcggtcacgttgatctgcttgggggagtactccggccagaccgcttcctcatagaagtagaacgagccttcctcgccctgctcgtactggatgaacggataaggtttcaggtcctccatggtgatgaccttcttggcggccagcgggttgttgcgcgagatgaacacgtgcagcggcgcgcggaagagcgggtggaattcgaggtgcttctcgcgcaggagcttgccgatcacgtccttgttaaaatcggacaggtagatgatgccgatttcggactgcatgttggcgacctggttgatgatgtcgcgcgtgcgggtctcgcggatggtgaactcgtattcgtcggacttgatggagttgatcatctccacgaacgcctcgacggcgaacatgtagtgctgggtggagacctggcacagctgcttgcgcggtttggcatgcttatagcgctcttcgagcaggtcggcctggtcgagcacttggcgggcgtaggtcaggaattccgcgccgtccacggtcagggcgatgccctgcgaggagcgggtgaagatctcgatgcccagctcgttctccaattccttgaccgacgagctcagggccggctgggagacgtacagggcatgggaggcctcgttcatcgagccgcactcgacgattttgacgatgtatttcagctgcagcagtgtcataaagtctatttatatcgctagggatagtcgccacacggccggtcaccgtcgtcaaggacgggtccatagacttcaactgccgcgatgcaacgtttggcgacttacagacgtacgccgagttctgcgagcgattcgcgtgcctgcaacgcgttctcgaagaggatgccgtggatgccgacctcgttggcgccgacgatgttcttggcggtgtcgtcgaagaacacgcagcgctcggccgtgaggccgaaacgggtcagggccagctcgtagatgtcggcgttcggcttatgcatcttctccacgccggagaccacggtgccctgcaacagctgttcaaggcgcgggtacttctcgaaggccaggtggaaggtctcatgcgaccagttggtcagaccccatacgccgtagccgtgggccttcaaatccgccagcagctcgaccatgcccggaagcgtgcggggcagcgcgtccgcgtagtggccgatgtagaacttgaagatgtcggcgagttcctggccttgttcgcgtaccacatccgggtagatgtccgcgaaatcctcgccggtgtccatgcggtcctcgtagcggaagaagccgcaggggtcgtcgtcggcgcagatgcgttccacgatctcatcggggaatcggccttccaggcatgcgcgggtgttccagtccagcagcacgccgcagaagtcgaaaatcacgtcggtgatgggggagttggccatgatgctccttgtgttgttggggccgttgagtggggtctgcgatttagtatagggggtttcatacgttggctcccctctctgaggggagccaacgtacggaatcatgcgatgacgtcggcgatggcttcggggatggcgtgggccacgtcgccggccacaatcgggtggccgagcgtcatgaagcgctggcgatgctcgcggccgatcagttccggctcctgccagccttgttgctcggattcggaggcgatcgccgccgccaggccatgcaggtaggcggccgaggccacggtctcgcccgtggtggccacgtcatcctgctgggcgagcagggcgccggtcagaccggccagcacgtcgcccgcgccggcggtgcccagccaggccggtgcgctacccgacgcatagacgtggtcctcatccaccacgatggtcaccgcgcccttcaacaatacggtggcgccggtgagctcgtgggcacgcttcgcgctgtccaacgggttcaaccgcacgtcgtcggcggtgtacggctcgtgcgaatcggcatgctccgcggtgctggcggcggtttcgaaccggttgagcagtttcgccatctcgccggcatgtggcgtgatcaccacctggccgggcacacgctccggcagcaggtcgagtgcgccggcatccaccacgattggcggcatgtcgtaggcgtccttgttctcatcctcgctgccgagcgcgtaatgcttgagcaatgcggcgatggtgtcccgctgcatatcgccgtcggtgccctcgacgctagcctcgggcacgccggaccccacgacccaggactgcacatgtcccttgccgatcacggcttccggcagtgcggcgagcaccatgttctgtgcgcgctccgggcccagataccggaccatgccggtgttcgcgcgggcggcggcgctggcggtgagcacggcggcaccggggtagcgctgcgagccggtcaccagaccaaccacgccccgggagtatttggaatcctcgaacctggggagacggaccgcgtcggacgcgaacgaattatccaccacctcgacgtccggatccttgtcgtcgatatcgaatccgaaatcgagcaactcgatacggccgcaggcgaacgtggcgggcggcagcaccgcgcacggcttcatcgcgccgaacgtgaccgtgaccgtggccggaatgtacgggccgggcagagaaccatcgttcacaccgacgccggatggcgtatccacggcaagtaccagcggaaaatcgcctgacgactcacggtttggcagggcgggctcatcgggagcctcgccgtcgagaccaagggcggaggcgagtgcggcggggatgccgcgtagcgagccttggatgccgatgccggtcatcgcgtcgatgatcagatgcgatttcctggccacggcgatggcggtctgcaatcgctcgccggcctcaccggcggaaaacccggacgcgcaaccgggaatatcagccgcgggatcaagcaccagcaccttgcctccggcgcgcacgaatgaggcgaatccggcctcatgcaacgaccggcccacggcgatggcggtgacgttcgcgccctcctgggccagcgcggcggccgcgaacagaccatcgccaccattgtctccggccccggccagcagcacgatcgacgtgtcctccagcgccagatcctcgtcgtccagcataccggccgccatgtgggccgcggcctgggcggccatgcgcatcagcggcacgcctttgtccagcaggggtcgctccatggcccggaccgtatcggagtcataggcgctgtgcagcagcagttcgcgacgatcggcgtcttcggtgtattccatggcaacccctttcttgtgtttgttacttgcggtccgtgtttacaggccgtacacctcgtgggcgaacttttcgaacacggggatcgagcgcttgaccttctccgtgtcgatgcagtaggccatgcggaagtatccgggcacgccgaagctgtcggacggcacaagaatcaggtcgtattccttggccttcatgcagaacgccacggcgtcgtcctccagcgccttggggaagatgtagaacgtgccgccggggcgtaccacgtcgaagccgatgccggtcagcgcatcgtagagcaggttcatgttcgtctcgtagacgttgagatcggcggtctggtcgatgaccttggccacgcccagctgaatcgagctcggcgggcagttgtggccggtgccgcgcgagatctggcccatcatgggcacgagcaggtcggcgtcggtggctgtgggattcaccgcgacatagccgatgcgttcgccaggcaggctcagcgacttcgaccacgagtagcaggtcagcgagttcgcgtagaagctggccgggtagggctgggtggcgccgtcgaacacgatttcgcggtacggttcgtcgctgatcaggaagatatcgtggccgtattcgacctgcttggcggtcaggatcgcggccagacgcttgagcgtgtccgctgaatacaccgcgccggacgggttgttcggggtgttgataagcacgacctgcacgttcgggttaagtgcagcctcgaatgcgtcgaagttgatttggaagttctcggtgtcggccggcacgatggtcagcttggcgccggcgcccttgacgtacggctggtattcggggaagtagggggcgaaggtgatgatctcatcgcccggcttggtcaccgcacgcatcgcgtgggacagcgcgcccgccgcgcccgtggtcgggaagatgtggttgccggtgtatgccatgccgaaacgttcgttgaggttttcggcgatcgcgtccttgacggatgggataccgagcgagggggagtagccgtggatggccaccggatcgccgttttcgtagaggtcgaccatggcgtcggtgaaggatttcggagccggcaccgagggattgccaaggctgtaatcgaacacgttctggtagccgatttcggcaccgcggctcgtggcgtactcgctcagttcgcgaatcacggacttgccgccaagcatggccttgtattcctcattgatcatggctgttctcctcgcatggttgtactggtatgcaccacgctactactatcgcggccggtttgcgccatttgccgcgccgtgcctaagccggctgttctatttgttctattagttctattagtggagtttggaccggcatatacccttgcaataaagccatttgtagggtctgaggctttccggggttgcttgtctcatagattttcggcctcttgatatttgcggttgatagctgtgatgtgtgtgggcgatggctgttgaggcatcatggggatctcttcgactgtccgccgtcgccatgccgccatgatgcctacagaaagtcgagttgcgtatttccgccaagcagggtggtaaccggtgggggcgatcggtgggggtgaccgacacccgctataggcagcaggcagccgcacacatcccaatatctgtgggacggcagacgagtcaatcgtttgtcgtccgcgccgtccctcaagagcgcgggatggcagacaagtcaaccgtttaacgtccgtagcgtcccacaccgacgactgtagaaaccgcggaataacgccgattctcgctgcagctccatgattatgcacaaccgttcatagcgagcgctgtgggacggcgggcggaaaacggccgaatccgcgtgccgtcccacacctcgtacaatccgcgttttggaaaagcatcaccgtaaggctgacgcgcatccgcatccacagcaggagccttaccggccgtaatcccgcactcgattattttttctgacaggaaatcgaacccgaaacactaacccatgcccgccccaccgcaaacagcgaataaccaaaaaaagcatgatctatccttggcgccgaataatgagagcctgactgtagtggctacgggtagctatatcggagaaggattcgatcagaagcgtttcgacacgcttctgcttgccgctccggtctcgtttgagggtactctctcgcaatatgtagggcgacttcatcgcgagaatgatggcaagaccgaggttcgtgtctatgattacatcgacgtgaccgtgcctttatccgctgtcatgtatcgaaaacggctgaaggcatacgcaaatcaaggatattcggtaaatcctgaccatactgagaaaatggacatgctcagtgcaaaggcggaagcgttgcgcgcttgcatgacggccgcgacgcagggcgaagatgctgcggatgcgttgctcgacacccggtctgacggattattcgaaggcagcatcgttacagccacgaattatgcagagatactccgcaaggatattgccggttgcgcacgttccctgattatctcggctgaatatgtatcacaacagggactcagcgcaattgacgatgaattgctccgactggccgacaggaaagcgctcatcgaagtttatgtccgtttgccggcgactgctgcggtggcaaccagaacacgaatagaacggaatattaatcggctgcgtgctattgggtgcattgtccggaccgtcgaatcgtgttccgattttgccataatcgatgacggattgatttggtttggaggcatccctttacttggcaatccaaggagtgacgactgtgcacttcgattcaaagatacgaaaatcggcgagaatctagcagatggactgaaacgacggtcgtcctgagtcaatattcagttaagataatcgcgcagtacgagggcgtgattgatgtgcgggtccttggcggcatagagcagggtcacgtcgggatgctccgcgcagatgtggcgcagattgtccacggcggcattggcgtcgagctcggcgatgtaacgcatgcggaattccgcgaatttggcggggtcatggccgaaccatttgcgcaggaggggagagggagcgacgtccttcagccacaggtccaacgccgcacgctctttcgtcatgccgcgaggccacaggcgatccaccagcacccgatacccgtccgacgcagtcggctcttcatatatacgtttgattgcaatacccatacgccccatgattggcgtgcgcttgccggaagtcaaggggagacgcgatccatctacccgttcgatttctgggtgttctgtctaaggccttgtgctatgacagctagcgattcagcagcttttggtgatatcgtccaaccggaccgccttgcccctgtcgaaggtgttcatagtgagatcgacgggtttggtcttgatgaacgctgacagcgcggtgtgcggcgggttgtcgatcaagtgggtgatgggggcaatcgccttctcgacgctgacgcccacaatggcgtaaatggcacgcgccagcagcttcatcagtggcgaatcgaaactgttcaatgcctcattgctgcgcacggcccaagggttgaacaacacatagtggatgcggcctccggtctgctgttggttttccgcgaagagcactcccagcagatcgttcagacgactcgtacagatagtcgcgcaatgctagaacgtgattgatgtgcacccttcattgacggtctctcaattgatctcctgcgattcatgccgtataaggaagttctcgaccaaggcgatcatcgtgtccttccccgcaggtgcggacagcgcaatcatcagcgtcatcgccgccaaggcgttaccctccacaagcaggggagtcatcgtcgcccagtatactgttgccgttcaggaaatacacgaacagtgcggcggcacaacgtttattgccgtcggagaacgggtgatccttgacaacttgatacagcaggttcgcggctttctcctgggtggaacggtacagttcttcgcctccgaacgtctggtagagtcctgcgacgattccttggaacgaaccgttgcgttccctcccgaacagatcggattgcgtgtagaacggcatcgaccggatgaacagcatcgcgtcctcataggtcaagacccactgggactcgtcgcccttgggtatagggacattgcctgtgtcatagtcgttaagcagcacaagactcggcaaatatcgttccaagatctctgcggtgccagcaatttccggttcggtggacctcgatagcaccttgacgacggcgtgaagtgcgtcaagccgcttgcgattgatgatataaccatcaacgagatgctgcttcagaactgagttggcccatcgccgggaatagatgccttccttggatttgacgcggtatccgaccgacaggatcatatccaagttgtaatgctcgacttggtatgtcttaccgtcagatgcagttgtcgcaaattctgcgacaactgaaaatccattgagctcttccctcaatgcattgccgatatgcttgccgattgttttgatatcgcggccaaacagcaatgccaattgctgtctgttaagccacaccgtgtcctcgtccaccttcacatcgaggtgcacggtgtggtccgcgctctcgtacaaagcaatctgctgcttcagttcctcgccagtcatgagattacctctctttttcggctgtctgtaaatcatgtcgttggcgtcgccaaattatgcatccagtttatcaggacagtcgaacatttgttcgattactgtatctctcatctttgtatgactttcccgacgacgtattggctatgacggaggtaatgggcacggggataatgctgatgatgggcatttccatcatgcaaaaacctatgccccgtattgaaaaaagctattggaccaagccgttgggcttaggccatgataattgggccattgcgcggcttatccgttcgacggatgttccggatttgcgatggcgttgaattgcaattatcaaatgaaagagcaaattgtatgagcgaaaacaatgatgccaaacacgtgctgttggtgttgatcagtcactccgatttgggaggtgtgagacctactggcttttatgttgatgaggccgcacatccttggcaggtgttcagacgaatgggcttcactgtgggccttgcatccatcgctggtggcgtaccgccgcaggctggccgtcatcccggtgaccctgtgcaagagcaatttctgcatgatgcggatatatcacgccagctagtgaatacgcgcgccttggctcaagtaaacgcgaaccgatatgatgcggtgctattcgttggcggtcacggtgtgatgtgggatttccccaacaattctgtggtgaacgccgtcggccggaacatctgggagcgcggcggcattgtgccatgggcctgcggcattggtggatatgacgttgtcggatggcagttatctgattgccggcaagcaggtcaccggattcaccaacggcgaagagcaaaatctcgggcgttatccgtggctgcggcgggcgaatagaagggagattgagatagaggcaggggagatgccgggtgcatcgccggcatcacgcctccgtgaaatactcgttttcgtccgcaagccggccgcctttgatgaacaggaatcgctcgcacaactcctgcagctggagatgagcatggcgatgctgcggtcggaagcccactgtctgagcacggcgatgagctggagcacgccgtccgggtcgaggtccacgaacggttcgccgagaatcaggaactccggatcattgaccagcgcgatggaccaacgcaagacgctgtttcatgctgaacgagaaaccggcgggcctgcggtcgcggtacggccaaagtcccacaagttcaagcaccgggcggattgggaggcgcgagcggtgggtcggacgattacagtgtgagccgaatacgttcatgaatcatcgaatcacaaggcgaggcggaccgcaagtattcgagagtcgccagttcggtcgatttcaatgacaatggtgtggacgattacgcggatatcgtggcgggtgcgcgcaaggacgccgaaaaccatccggcttacgattccggctactatcagggcggctatccgccggccgatcgcggggcgtgcaccgtacgtgattcacaacatggcgcagcggcagcgcgaaaacgactacttcgccttcaagaagcacatgacggtcaccgggcactaccgtttcgacgcttcgaaagtgctgtagagcgtactcagggcttggcgatgacggtcggagcggcgtcggcattgccggctttggctccggctgcatcagctgaatcggtgccggccgcactggcgttagcactatcgtcagcgttggcaccgccggctttggccttggcatcagccgcgctcccgccatcaatcaccagtcgcaggtaatcgcggtcggcggacttgcggcgtggcacgaaacgactgatgatggagtccttcttgccgcggttcttcacgtacaggaaaccgaacacggagaacacgaccgcgccgatgaagttgacgaccagatcctccatcgtgtcgatcagaccgatgtcgaggtagccgccgaggcccaggtcttggccattgaccgtgacctgggtaatgtcgttgatgcgaatcgcatggttggtgtgcgtggggtcgagcatcaccgagctgatggaatgcacgatggcgtccttctgcatgtcgaacccgaacaactggtccatgccgaattcgaagaactcccagatcacgccgatggtcatggagaagcagaaggacacgatcgccagatacaggggcgaaagctcgaacttcacccggtcggaccggttgagcaggtcgaccagcgagaagccgatcgccgcagcgaggaagccgttcatcgtatgcaacaccgtgtcccagaacgggaagatctcatagaacgaactgatctcgccaagaatctcagccgagaacacgaacaccagcacgatgacttccagcaccgaaggcagctcgatgcggaactgcacctggatgaacgccggcgccaacagcagcagcaacgtcaggatgcacaggaacacattttcgtagtcgccgttaaagaactggagtattgccatggcgagcaccagcatgcgcagcaccacatagaccgcgaatgagcttttgtgttcgcggatttccatgcccacggctcggctcatggttttccagcgtacgcgccaggacggtttgcgttgtgcgtcgtgctgttgcgactgtttccgggtcatccttacctctttctcgcattgttctcgcgccagtctatccgaacctgctcacaggcaatcggcaagaacgggcgatagtctggccgcacgaaccgaacggaaaccgatactgtctcgattgtgggccacgcgaatcatccgacaatgctcgatgaggccattacgccggctcctcatggctactggtcgtagggctggaaatcatggccatgccggtagtttgggctatcgtgaggtgtgcgagatgggctttgtgccggctggcagcaaatccaagcagcgaaacaacggaatgaacgaagcgaaaggaacggtatctgatgactccgattgaattgtcaacccgacgccgggttacgggactgacttcggatgagttcgccaggctgttcgtctctttgcagcgtgaagtggacggcgaagccgcgcattggagcgccacggatgtcgaatcctgggagctggtcggcccgccggtgaccgccgaacagcatctcatcgacacgttcgccgcggccaacgaattcgtggccacgcttgcggaccgcctgtaccacacgattatgccagtcacggaagaatcggtcatcaccgcatacgctgatgacctcacattctgggcatcgcatccggaccttggcggagtgccgtgcgcattatggaacatcgccgcactgcaggcggccgaatgggcccgcaaggaaaccggcatcgcctgtgaactggacgtgcgcgaaccgctggtgtgacagctgagctcaaacatgcgtaggtaacggcatggtttgaggactatggtgttgcgttatcggtcggaaaggatgtgatggtggggcgtcatagcaaaaaagcgcgtggccagtcgaggagatatgcgcgaaagccctccgtttggagcgaaattcgcggctatctgctgacagtgatcgcggtgatgctggtcgtgttgctgggacgtaccttcgtgttcaacgtatatgtgattccatcccgcagcatggaagacacgttgcaaatcggcgaccgcgtatttgcctcgcgattgactccgagactctttacactgcaccgtggcgacatcatcgtgttcaaagatcccgcagactggatggagggggagcagcttcccaccaatctgatgtcgataatcgacagcaatcgttacctaatcaaacgtgtcatcggtctgcccggcgataccgtcgcctgcaagggatccggggagcccatcacggtcaacggcaaacccattgatgaaagcgcttatcttaagtccggcgtgaatccaagcgacagccctttttccgtaaccgttactgacggcaacgtgttcgtgcttggtgataatcgctccaattccagagattctcgataccatcttgacgacggcaacaatgggctagtgccatacgacgatatccaaggtgtggcgttgttccgcttctggccatttacgagaatcggcatactgaactgagttcggcgtgaatccacgagttgatacgtgccgcacggtccggtgcatcctgcagccggaccgttaccggaaccctccccccgaaatctgacgacccccctgtctcacagctatcgtacagctccgatacgggaaacgtgcgggtgattccataacgactacgtacttcaggaagtgacgtgtatcacactatggtcatgtgttcagtcgcgcgcgacccaaagcgtatcgaggtcgtcggcctcggtcgcctttttgcgcttgcgtacccactgttgcaggaaatacgccccatagcaggccacgatgaacacgagctcggccacgagcgcgaaccgttgctccacgtcgaaaatcaccaatacgaacgatgcggtgcacaggatgaacgccgcccaagacacgtacggatagccgggcgtgcggtatttgagttcgctggtggaatggccggcagccagccaacggcgacggaacacgatctggcagtaggcgatggcgatccacaccaccacggcggacaggccggaaagcgccaccaacaccaggtacacggtcgaggcggcgatcacggaagacaggagtgccagaaggccaccggccatcgcggcgcacagggcgagcatcggcacaccgcggcggttcgttttggcgaaccagcgcggaatcatgccctcgttgcccattgaccacaccatgcgcgtggaggcgtacaagccggaattcgaggcggaaagcacggccgtgagcaccacgaaattcatgatgtcgcccgcataggggatgccgatgctgttgaacacgagcacgaacgggctttcgcccacgccggcctggcgccacgggatcagcgcgcacatcacggtgatcgaaccgatgaagaacagcaccagacgccacagcgtggtgtggatggccttcggcacggcggtttccgggtcgcgcgtctcgccggcggtcacgccgatgagctcggtgccggagaacgcgaagttgacggtcaggatcgtggcgaacaccggcatgaagccgttggggaagatgccgtccttgacgaggttgccgaacatcggagcatgctggtagccggcgattggaataacgccgaagatggcgagcaggccgatgatgatgaacgcgcagatggcggacaccttgattgaggcgaaccagaattccgcttcggcgaagaaccgcaccgacaaggcgttcaaagtgaagatgagaatgatgcacgccgcgctccacacccatgtgggaatgttcgggaaccaacgttgcatgagcaggccggcggcggtgaattcggagccgagcgccaccgtccaggtgagccaatactggatcgcgatcacgaagccggtgccggggccgatgaacttttcggcatacacgtggaaggagccggtcaccggcatggccacggacagttcgccgagtgtgagcatgaccagatagacgatgagcgcgccgatgctgtatgccaggattgtgccgatggggcccgcctgctgaatggtgtagccggaactcaggaacaggccggtgccgattacgccgcctaatgagatcatctgcaggtggcgggattccatgccgcgcttcaggttggtatgtagggcgtgctcgtctttgccatcatgtgacgactcggactggctggtttgcgctggttggttcacctgttccgaatggcttcgacggccatccgtctgaatctgcggttcctgttgcgaggacggcgactgtgccgccgtgtcggtgtcgggctgactcatgtttctctctttgccgtgcgtgcgttccataggcgtcgtcgtgacggcccggaatagtatacccgcaccgaggatatagctgcgctgcatgatgctgagtcaaaatcagccccctgaaacggagataggcactcgcagcggctacttcaccttctggatgcgcagcacggtggccaccacgtacaggccggtgctccacaggaggccaaaggccagaaacccgacggcaaatcgaatgttgtttgtttttttttccatgttctcggacatgttcgatggcctcctatggttttcgttgacgttttggttattttgtcgaccatctcatattggtggaattccgggctttttgggcgtgctgttgcctttgttgcgccgttgcgatatcggtcttgtgaacggttaatctactcaggactcaaaatacattccagcccgcggcacgttcggtgttgcaggacagtaattcgaggatgagcgactttgatatgcagtgatacgccagtggcggagcgctacaagtcatggtggatgagatgtgattttcgtcgaattggtcagtgcttttggacaataccgaattggcgtcgaatcgggtatatactaggaccgtcttccaggcggaagtatggttcagaaggaatgggtagagcatcatgaacggcattgcacttggcacccggctggggtttgccgtatgcgtgctgctgatgatgccagttcttctgcccgtggcctgtgcggagtcgttgcggcagcgtttggccggtgcgtggacgatggctgcctcgcgtgggcgggtactgtcgcgtccgatgccgatggcggacatcatcgtgttgatgacgttgttgttgttgtcgttgagtgccactggctgctggattgccggcggtgattcgcagactgccctggccgccatggtcttcgtcgccacggtgacggctgtatgtgcgtgctgcgcggtcgtgctgttgtcgttcgtaggttcggccggccgccgaccgttgcccgccagcttccgcttcgatgcgacggtgatgaacgccgtccgctcatgggcccgcccgcaatggatgccacgctggccccgttacacgctccccgattcccgaatctgatttagcttctcttttcagctctcatcgttgcgccccacggtctaacgcaattgtgttgtttaggcgacatgtggatacgcatttatgcgatgttcttgtttccccctaatttggttcccctctctgaggggagctgtccgcgaagcggactgaggggagttcccagctgttgccgtaccagattgcagttgcttgaactcggaaacacatcccagattcgtcaattcatcaggaatcccaatgaacttcatcaatatcctcaaccacatcctgcgacccctagaatgggttgtcgcccaactgctcaccctgtttcaccacgccctggtcacgtttggcatgactgctggccccagccccgcgtggggcatcgcgatcatgtgcctcgtgctcgtcatccgcatctgtctgctgccgctcttcctttcccaaatgcgtgcgatgcagcggatacaggtgctccaaccgcagattcaacgcatccagcacaagtacgccgcgcgcaaggacccgcgttccaaagaagccatgcaacgtgaaatcatggccttgcagcagcgatataacgccaatccgcttggctcctgcctgccttcactgatccaggcgcctattttgtgctcgctgttctacacgctgcaatccctgcctgcaatcgccgatgggaatgcggaaccgttgggcggcatcgaccacaccatggcgggcgacatcgaatcatcgtccatattcggcgtacgcatcgccgactcgttcggcacggttgcctcgccgcagtcacgcatcatcatcggcgtggccgtggcgttgatgtgcctgacgttgttcgcgatccagtggatgctcattcaccgcaatacgtcgaaagatgctatggtctcgccgcaattccgtgtgcagaagatgaccgtgttcgtctttcccgccatttacgtggtgtcgggtgccacgttgccgttcggcgtgctgctctattggttgaccaacaatctgtggaatctcggccagacgctctgtcaattgcgatggttccccacgcccggttcggcggcaggcgagcgcaaggccaggcgcgactacgagcaggacaaccgtcgccgtgccgcagccggtctgccatccctagaggaggagcgtgcgatggccgcccgcgaggaggcgaaagcccgacgcgagcgcgaaaagtcggccgccagccgcaaccgcaaacaacacaaaaccccacacctcgccaagcgctcaatcgtgaaacggtaacgcactactcgtctactggctcccctctggaggttgagccgttaagcaaacagcgaagctgtttgtaagcgagggcgaggcgacagtcgagctatgtagcgcggtcgccagaccgtcttcattacggctgaactggcgccgtagacgactgaggggagttttgctaaggccgcatgatgttgtcacattgtttttcaatggttttcacttggcgtgtattgactgattacattggagtacaacacaattgacctatacggataaatttcgcagctcaaagatggggaaacgatatgagactggcgatggcgcagatggcgatgaccgacaatatcgacgaaaacgccgatagggccttggcctactacgatcaggccggtgaggccggtgccgatctgttgttcttccctgagatacagttctccccgttcttcccccagtatgagaaccgcgatgcgtcgtgatatctcatggacctgaccgaccgtcacgtcgccgcattgcagagcaagactcggcaacatggcatgtacgttttcaccgaacctgtacctcaaagctcaggacggccacaactgcgacgcttcgctatggatcaacgaacaaggccatatcagcgccgaaccgttggagatgttcctgtgggagattcgcgtccaggtcatgcagaaccaggtggccatcgccatgggcaaccgggtcggcacggagggtgatgtggcgttcgccggccaatcagtggtggtggacccgtacgtcaacgctgccagcgaggccgacgaccaagaacagttgattatcgccgacatcgatctcacacagaccgcagcagcgcgcaaacagcggccattcctaggactgcgccggcctgaatggtacgtctgacaagaacaaaccgacgtcagcccggaatcttctcgacgatggtgttcaaggtgtcgaaagcctcatcgatttggtccactacctgcttgccctggttgaccatttcggtgatctgttctgtgtggggttgcggcagcgcataaatcgacgtcttgacgcgcttcaagaccacgccggcgtcggacagatcctgcttgatggaggcgattttgggaatggacagcgtgccgtcggagaagttcatgccggacagcagctcttcgatattgaagtccaccaacgtgccctgcgcggcactgtcgattttgggcagggcgttggtcgcggcgtcggcggccgcgcccagcatgccgcgcaccgccttcacgtccgaaccgtaatatggcacgtattcggcggcctgccatggcatgccttgggtttcatcacgcgccgtgacgatgtgactgccagcgctgcccatctgctcaagcgcttgcttgaagtcgccctgctcgacggattactgcgcctcgccgattacccgttgcgccgactgccagaacagccagccggaaatgcccgacgccagcagagccgcgaccagtatcgtgagaattacggtgccgatatgtttgcgcttagccataggaccaatgtaccttttgtcccatctagcgccattgtgttctggcctttagtccatcaaagtgtccaacagacttgtcttctctgaagaagcgcatggaaatcagttatagtcgattctctcctgtagctggcgaaaaaacagatataactgattccttaacatctatcggtgtctttgcttggcttttgttgagtaacgctctgccgcatcatgcaagtgcttgaccgctatgcgcttgcactgaacattatcgttggtggtgcataggctgtgctgtccgggcgcatcacgtcggcgcgcgtggtcggcacgttgttctccatcgaccccgccatgagcgtgatcatcgccgcgccgatactgcgccagaccattaccgcggtggccgtgcttggcgtcatcgtcgtctccctcgcgggtaccctgctggtgtgggcctccggcggcgatgacgcgaatggaaaagtcggtcagtaagttcctgggaaaggaacatcgaatcctgtaagagcgatgatggcgcggtccagttctcgtcttctcgtcgtcctgtttttgttttcacacgtaacgaaccccacaatcgcaccatcaacatcgtgatctcttcgggggagggcgatgtcgcttgggcgcggctgtggggattcgcggcttacaggtcctgaacgttcatacgggccagctcggcgcgacgattgatcttgtcacgctgatacaagtagatgccggccagcacgatggtggatacgttgttggacaggaacgcgatgaatgcggaaagcacgacgttccacatgttgccatacgcaccgatgtccgccctggcgaagacggtaatcgccgccacaagcgacagcagcaatgtgatggcgggcaataccagaccgggccacttgctgtccatcttcgaaagcctgatctgcaatatgatgaagccgatgcagatggcgatgagaaacacgaaaaacactacggcaaatattgtggcgccaatcatgattactctccttgcttgagctgcttgcgatattcgctgatgaggattttggcggtgtcgaagtcgagcttgtcatcgaccgcgagccgtttgatgagcgcgatatacggctcgttctcgatctgctcgcccaactggattttctggatgagccggtcgagccgaagccgaacggtggggtaggagacgccgtactgcgcggcgacctccttcatggagcctgatgcgagcagaaaccgtttgatgaacgtcatatcctcgtcatcgaggttcgacatccacggcgggatcatcgtcatatccatacctgcctccttcaatctacggcgggtttaataaaattaagtataccataaataatattaaaatcaaatagatatctgtttaaagtttttcgtagattagtttgaggtcgtgatgtaagaatgcgtacgcggacgcgaaggaccggcacatgtcggcacgcatgtagaagcatcggtcaatcggatatgcatcgacagcaccctgaggcattgacggatagccgattcctgtcatgcgatcgcttgacagcatgttgtctgattgactctttgagtgccataattgagatggcatgcgtacgcgtcggactttatggaatgcggggacgatatggttgcggacgatgaggtgcgggcctcccatggtgggcgtcggaatcaaggtctgctgtggtttttcggcgcttccgccacattgggcgtggccgccgtcacggccatcacgtgcgccgtcatccggtacggctggaatgacggggagttctggaagctggtggtgccggcggccgtggcgttggtggcggccatcgtgtgggcggcgctcggcttcatgcgtcgcgccgggcggacgcctgacgttccggccgacgcgaacgataccagcccggccgaatccaggttcgattcggcggccgcccagattctggcgatcgtcgccatcaacgtgtggggcgtcatgttcatcgtcttcgatacgttccagattgacccgtggcggtacgtgacatgggtcgtgcccgtgatgttcctgctttatctggcggtcttgggcatcggcagggcttgtttccgcaaacgacagaaggatattcgcttcccggaggaaccaagtatgacgagcagccgtccatcatacttggcataggcgggcagttggacgatgccgggcaggtcctcgttgtcgctggtctggttgagggcatattgggtgccggtcatggaacgctactggaatctgtcaccctagggtgtcactttccgtgtttacctcgacctgccatgcccctggcgcgaaggttgagaaaaacggcgtcaactttcacgacagggggctacctcatgccttggcaaaatgccggcacaccgattcaggcgctcggactggtgaaacggacagggttcgatgctcgaaccgcctcccgacccgcaaacacgcagactgttctcaataatgtttcgttggatatcgatggagcgggcttgacggcgatcgtcggtccgtccggcgcaggcaagacctcgctgctgtatgtgctgtccggattggacaggcccgattccgggcgggtgaccatcggcggtaccgacgtctacgcactgaatgaggaacggcgttcgcggttcattcgcgggcatatcggtttcgtgttccagcaatacaatctcgtgccgtatctgacggtcgaggagaacgtgatgttgccgctctcgctcgcccatcgcaaggccgactacgtgcaggtcacgcagctgctgtcccggttcggtcttcgccagagggcgaagacgacggtaagcgccctgtccggtggcgaacagcagcgcgtcgccctgtgccgtgcgctgctcatgcgtccggcggtggtgttcgccgacgagccgaccggcgcgctcgacaccgcgaacagcgagcttgtgctgcaggtgctgcgcgagctggcggatgcgggctccagcgtggtcatggtcacgcatgacacggatgccgccgctttggccgaccacgtgatcttcctgcgcgacggtcaggtcacccacatcgctggcagactcaccgccgagcagattgccgatggcatacgccgcactttcgtaccggccgggtcgccgccgctggttgcgccggcgcggtctgtcggcccgatgatggtgaacgcccagcctatccaatccgtccaaccgggccgaccggtccagcgcgtggcgtatccgcagcagcggaaggaggctcatcgtggctaggtatgtgctgcgtgtgctccgtgacaatgtcacgggatgggtgcccacgattctggtggtcgcggtggtgaccacgctggtgggcatatgcatgaaccaattcgtgtggacctcgtctccgtcgttcacattggccgcgcggcaggcgggtcttgatccggccgagttcggcatggtgtcggtcacgatctatgtggtggtgtcattactcgcgttcttctcgttgacggtggtcggctcggccacggtcaaccgtattcacggcacgttcgcgcaatggcggcttatgggcgccagcccgagtcaggtgcttgccagcatgtggatgctcgtgggtgtggcgagcctgttcggttccctgatcggctctctggctgcagtgccggccagcctgctggcggttcccgagttcaacgccatggctgcggaaagcttcgccgatggattcggctcgttcgcacctcctgcgttcacgccgtcgatggccgcgtggctcggatccctgctgttgggtgtggccacgtgcatgttgggcgcgtccatcccctcgctgcgcgcagcgaagatccgtcccatcgaggtgattcgcggcacgggagccatcgggatacggcacggttggcggtcttgggcgcactgggcacttggtttgattgtcatggcggcggcgctggcattggcgttctccggcatgggcacgccacggacgctcgcgttcggccaggaggcggggcagacattcaacagcgcgctgtgggccggcatcatcgcctcgttcggcatgtacatccttgtcagcatgctgattccgattctattgggcatcggacgtgtcgtgtgtcgcctgtgcgggtccgcgaccggcgtgctcgccgcccgttccgccaaggcgaaggccgccagcaacacgaacacgattgccccgctcgcccttgccatgggactgtcggtcaccctgctgacctgcgcgcgatcctatggccggatactcgccttaggcggccatccgaagagcctgaactacgcggactcgctgctgctcataacgatgctgtgcatcgtgtccctggccaccagcatggcggtcattgccctgtcgaaccgcagcatggtcgccgaccaggcattgctgcgcagcatcggcctgtccccacgtcgtgtgatccgcatgtatctctggcagagcctgcagctggccgccggcgcggtcattctctcgctcatcccggtcgccgtcagcgcaagcgttttcgccgcaagatccgcggcgctcgtcggcatccccgtggccgaaatcccatggccgggcgtaatcggcatgggcacggcctgctggctggcattgttcctcatccagttcacgcagattcgccccgcgctacaccgcagcgtggccgacacgatacgcacatgctgacatgcacgcaacatcatacaaaaagagccacaatgggagccatgaaaccgcaatccgcgcaggccaataaggtcacggtcctggccgtgccactggtcatcgccgtggtcgaatgtgcagcgatgctgtgggagcatgcgatcggagcgccggccgacaccatgtatacgtttgccaaagatccgctgggattggctctgctgctggcgatgaccatagccagcagtgcgatactgcttgtccgttactggctgccagccgttgccttggcgcttgaagcggtattgttaatagttgcctcgtactggcggttggactcaatcgtgatgattcagacgctcgtcgcctgctatgcgttcgcccggacagcgagggggcgcgggctgtgcgttggaggcatcggcatgatgctgtcgatgaccgcgtcggccatcatggtgcatccggacgttctcgcgaccgaatgggtgagtcgagtggtaacgctggcagccgtgggaggcggcgcgcttgcagtacgtggcaggcaacaggccaaggaagccgaacacaaagctgccgaggaatgccggcgggcagccgagctggccttccaacgcgatgccgcaatacgccgttcgcgcatagccggtcaactgcacgacagtgtgggccagggtctgaccgtaatcatcgcactgtctgagggtctggccggcaaaaccgatgacccacgcgtggaggatgcgctgcacggcatcaacgaaatcgcacgagagagtctgggcgacacgcgcaaagccgtccgcgcactgaccgagttcgatggagcggcgaacggtgacgatacgcacacccaagaatccgaccagcattcatgggatgacattcggccgattctcgcgcacgcacgccggctgggcatcgtcacggtgttcaccgagactggtacgcgcgccgatgacgaagctcaggctgatttgtgtttcgatgtgactcgcgaagccatcaccaacgccatacgtcacggacagaacgtggtgcatatcagcatcgcctggaaccacagcgagaacggcaccgtcgccgtgattatccgcaatgacggcagtcccgcgcgcaaggacgcgcgcaaggatgacggtactgggctcgtccgtctattccaccgcgtcgaatcggcaagcggcatcttcgaatacggtccaaacgaagacggcgaatgggtcgtcgaggcgaccatcccgtccaacggagtgaacgaaaaggaccacaccgcatgattcgtataatgctcgtagacgaccagcgtttcgcgcgacttggcttccaactcatgcttgacgatgcttccgacatcgtcgtcactgcccagtccgctgacggccgatccgccatcgagacgctcgaacagctcgccgttcagcatcgtccattgccgaatgtaatcctcatggatgtgcggatgcccggtatggacggcatcgaagccactcgccgcatcaccagacgctggcccaccatcagcattctcatccttaccacgtacgacgaggacgattacgcctttggtggtctcgacgccggagccagcggcttcctgctcaaggacgtcaccaagcacaacctcatcgacgcggttcacgccatcgccaacggtgacgcaatactcaccccacgaatcaccagacaagtgcttgaacgaggcgttccgcatcccaccagcagccagcgccagcaagaaatgcgcaaagctttcgacgcactcacccctcgccagcgtgaaatctgcgcactcatctccgaagggctcatcaacgaggaaatcgccaatcaactcaccgtcgaacctgcctccgtcaaacgtgccgtgacccgtatcctcgcaactttgggcctgcgcaatcgcactcaaatcgccatcggctggttcaaagcaggcatgtagacctgctatttgctcagcagctcattcaagcggattgttgttacgaatgcgactaccgcacgccctcccaagacggattccatgttcgacaccccattcggcaaggtgggcttggcggattttagtgatggttgcaacacctgtgtgttttgccgctcttgatggcggtcttggattggtgcgatcgtatcatgctgtgttgatgagttcgagtattttctcggatggtttcctgtagccgagtgttttgcggggccggtcgttgagttcctcggcgaccgcgtcgaggtggtcctcggggtatgcgctcaggtcggtgcccttggggaagtattggcgcaggagcccgttggtgttctcgttggtgccgcgctgccagggtgaatgcgggtcacggaaatacacctgcatgtccaacgtggtcgagatgcgtttgtgcagggcgagctcgcttccctggtcccaggtcagcgagttcctcaggagcttgggcaggtattgcattttccggatgacggcctgctggacgtgtttggcgtcgtgcccgtcgggcaggtgcaggaggatcgtgaaccgtgtcgagcgttccacgagcgtgccgatcgcgcttttgttggccgcgctgcagatcaggtcgccttcccaatgaccgggtatcgcccggtcctcgacttcggcgggccgctcgctgatcatgatcatgggttcgcggaaacggggcttgcgcgagtccgtctgcccgtgcggccggcgttgggcgcgcccgctcctcagggccttgatgacgtcctttttcagttcgcctttggcctggacgtagatggcctggtagatcgtctccgcgcacacatgcatagcatcattatccgggaaatcggcgcgcaggcgccccgcgatctgctcgggactccaatgcgcccgcaatcctgcgcgaatgtatgcgagcaggccgggcaccgtatggatcttcgcgggcttgggtcgtctgggccgtccgcgctcatctgctggggccggtacggctcgtacatgccggtcgcgggattcgtgttgcgcaccagctcgcggctggcggtcgacgcgggacgattgagcgtgcgcgcgatcccgcgcacgctcatgccggccttccgccagtcggcgatgctgatgcgctcgtcctggctcagatacctcgaactgatcttttggggaatgtccacggtggaacgataccagtccaccgacggtttctcgttcctgccgttcgatcgtgtccttccgttgcgccacaccttgccggtgcgtttggacacgcccaccgcccgcgcggcctgcgtgaagttcatgcccgcctcgagatgctcgacgtaccggcgtcgccgcgccgcgcacatctcgccacgcgtcgcgtactccacgcccttgaacacccacctgtccacctggccctcccatcagtcagccaggcgttgcgacgatcactggaacccgcccttcgccattttttttggggggagagaccggtggcggcaagtgtgcgatgggagtcggatgcatcgtccttgcggatgatgcgcaggttcattcctttggccgatggatagtttcggcaaatcgagggagcatggagcaaccgtcatgcgattgcctgacatgatgttgcgtttgcggccgctgaagggtgaaatggcggcgacattgcaacgcgcgggtctgggcaaggcatcctgcctttgccttcaggcccgcctttcgtgaagggtgattatgccagttatatcggctgcgaatctctcgatcgggtacaagggttccccaatcgtcagcaacattaacctgcggttgagcacgggtaggatcatctgtctgcttggggcaaacggcgcgggcaaaaccacgttgatgaagacgctactcggacggataaagcccgtgagcggagaggtcacgtacacagggacgaatatcaatgagatgtccgcggcgatagaccatcccagtttctttccttacctgagtggtagagagaacgtcgaggtggtctccgcgttctggggtctggatgtggacccggaggcggcgttggacggtgtgggcatcaatcgcgcggcgtatgggcggaaggcgaaggactactcgacgggcatgaaagagcgtctggagctgtgcctcgcccttgtgccgcatccgaggttcctgttcctcgacgagccgcagaacggtctggaccccgatggcatagcctccttgtccgaaacgcttcgcgcctaccgggacaaggggaactgcgtagtcatctccacgcatctgcttcatgagatccagggcgtcccggacgagtgcatcatgattcgtcacggccgggccgtgcaggtcacggatctgaccggggtgaacctcgcggatctgtatcaggggaggtagggtcttgaacgccgtttcccctgttcgcgcgttggtcgcctactactggaacacgtggtatttcctcgccgcggtgtttggggccgtctcgtcccttctgctgggtgcgtggatctcaagcgcggcgaacggaaccccgataaccggagggtattgcgtctatttcaccgccacccagccgttgatctgcctttcgctgctcttcgcatgcgatgccagggtcgcgaaggcgcactacggtggcctgccgcgccacgtgtattccgcgtggacgccatgctcgctcagggccgtgttccgggccctgatcctgacctccgtgaacctgattggcgtactgtgcttcgacgccatcatggtcctgacgggtaccggaattcacccgcatctggcagctgtcctgtgcttcgtcgtgctgcagagccttgcgacctccctgatctactcgatcgtcgagatcgccgccgatcccagaaccgccggaatcgtctcggccatcctttgctatgcatggattctcctgccgggcgaccttcccgactatgcgacgccctacgtcgcgaacgccctacggaccgtcggacttaacctgaacggcaccgtgatgtcgccggcggaagcggcgagtcgagcgtccgtcggccccgtgatggtcgtcgtcccgatcgtggtgcttttggttgcctatatgctgttgagccggttccgtcgcgaaggagtggagagggaatgaagtccctattgcgtattgagcgtgtggcggtgatccgctggtcgacgctcgccttcgtggccgtgctgctgtttccgttgttctttttgcgttacgggaacacgggtgcggtggtgcagtcggcgatggtgatggcgcttcccgtaaccgcggccggtctcgtcttctccaatgcaagggtgccctcctcgtaccgttccttcagcatccacgaccggctcctgcttcgcttcagcgtgaagtcgctgtcgctcggcgtcgtgatcaacgtctgcctgactttgctgtacgggcttgccgtcggattcgtcgtcaacgagacgctttcgtcgcgtaccattctgatgcttgcgttcaccgccgtcgtcctttccctggcatgcttcgttctgcgactctgggtcagtcctctcgtcgcctggaacgtcgtcgccttcttcatcgtcgccggacttacggtgagttccggcatgttcgaggacgcgccgatgctgtacgccgtcataccaaccacatgggtgttgaacggggtgaaattcgccggttacgtgattccggtcggcgtcgtcatcgccgcgataagcgcatgtctgctgttcaaggcggtgaaacgtgtctgaccgaagccgtatacgggtgcactgtttcggatcgtaatcgtccggcagccagctttctcaccgtattccgttgcgggagtgagcctgccgctttccgctgatcccgccatacaaagtcgactccgcacgtcgcgagtcttcgccgaacactgtcattggtgacgcagaggtcgtgtgggaatggccgtgacaggggaggggtattgggcaagcttcgggcgccgcgttcggcgcgtggccgtgtgatggcggcggtcggcatggttatggtgggatcgttgggcatccagacgtcgtcgtccctgtcggcgtcgttgtttagtgcgttggggccgattccggtcagttcgatgcgcatgctggtcgccgcgatcgtcatgctcgcgctcgtccgtgtgcttcggcctgtacacgctcttcgccgaccgggtcggcaagacgggcaccgggctcgacgggctcgccttgtcggtcacggtcgcggcgctggccacttcgccggtatccatcagtcacgccccgcacatgtcggccgcccagtggggcatcatcgccgcctcggcggtgctgggagtcgcgattccctacacgatggacacgttgtccgggcgtatcacgtcggcgcgcgtggtcggcacgctgttctccatcgaccccgccatgagcgtgattatcgccgcgctgatattgcgacagaccatcaccgcggtggccgtgatcggcgtcatcgtcgtctccctcgcgggtgccctgctggtgtggtcatccggcggcgatgccgtaaacggatgattcttgtcatacgattgcttgacatggctggtctgcgaatgcatgttttaccggccgccatcgattggaatgccagcctccagctgccagtgggcttgttcggtgtgggtttggaaggtgccgacgtgtgtttcgatgatggtttggtagcggtcgaggccgagtctcgtgtcatcggatgcgatggtgtcgctggcggagacgtgaatggcgtccgtgtcgaaggtgacgcagatggcgcaccattcgcccggattgtgtgtttggcgatgttcgcgtacagttccgccagcaggcccgacagcagtcgcatggtctccggcgtgagcggccggtgtggttcggcgagcaggttgtcgccggtgaatcccggggcttcgagtctggactcctcctcgtcgatcagcgattgcagaccggcacgctgcgcggcgatgccggcttctgcgggcacgggccggctgccgcactcaaatcgccgtcggctggttcaaagcaggatgtaaacccgctatttgcccaaacagttcgttatggctgccggttcgcatgaacatggcggtaccatcatcgcgaatccatagaagtagccagtcgccggcattgccgatgtggcattccagtacgccgtttaaatcaccggtaagtgtgtgggcgcgatgcctacgcctcaatacttccttggagtccgccgtgtcctcaagaaccagacgaatgacttctttcagcgggcgtaaatcagtgtgcttgcgtttgagcttcttgatatctcgctggaatgccgccgtgtaatccggtttgagcattgatcagattcccaacgaatcgaacatctcatcggcactgttgaagcgaggttggccgtcggcgagcctgttcttcgcctcgtcaagggcctccatggtttcaggcggcacgatcgtataggaaaggtttaggggaatgcgcttctcccggacaatctgcttgtagaaggcgcgggtgaccgaagacaagtccagaccgagatcctcggctatgtttgcggctttctgcttggtgtccgcatccacgcggactgtgacggatgccatgctcacattaacctccaccatcattacgtaagacaatagtatgtatttgtatgctagtagtcaacattctgcggttgcgacatctcgaccatggtacacatcccgcaagcggatcgtttaccggatgcaatcgatgatcggaatgccgaccatccagctgtcggcgggcttgtccagaatggcttctggttcatcgcaacgccagcgcgggttgcagccgtatggctttgatggccggggcaagagagccgacaagcgaggtgacgatggacgcacaggccgcaatcatcgccgccgtatatgggtatgcgggcggttccagcggcgagtcggcgggcatcatccacggaattgcccagaccagtaccgcggagatgagcaccgcggcgaaggcgatgatgaggccgagcagcacggacgagccgatgacctgtatggctatgctggctctggtcgcgcccagtgcgcggcggatgagcagctcgtgcgagcgttgctcgatgccggccaatccgatgttgatcatgccgatggcggataccgacaacagtaatatcgcggtgacggtgacgccgagttggagaaaaccgatgacctgctcgtaatcatcggcgttgtcggaacggttccatgacgatatgctgccggtctcgacgtcggacaacagatcgtccaacacggttttggcgtgttgatcgtccacgccttcattgggatggacgaggatggtcagcccatccggttcccaggcttgcggccagtagcgttgcagtgtggtcgcgttgacgtagatggtgggtgtgtccgtcccgtcggcgatgacaccgttcacccgtgccggcacctgttgcggatttcctgtccgggcgagtgccacggtgccatcgtgcacgtattggcgggcgctttcgttgactgcggtttccagcgtggcgggttcgtccgctccggtcagccatgtgccctcgatgatgggggcgggcatgattcttgtccgttcggcgtcggtgatgatgatggtgacgcggcgtatctccgtgttgccgtcatcggacgacgcccatatggcgaggtcgttgaggtgatattgcgccgatgcgattcccggacggaaatgcgcgaggcgttcctgcaaagccgtgacgacttgtatgttcaccgatgatggcacgtcgacgatggcgctataggtgggtgacttgcctcccagtcgcgcgttgaccgcttccagatagtcgcgtccgagcgtgccgacgagaacgccggcgatgagggcgatgatgccgatgaacatcgacagggcggtgaggctggtacgcaacgggttgatgcgcagatccttggcgatcatgcggatcacgacagtcgccccctgtcgatcgtcagtcggcgttcgcatcgggcggcgagctgcgggtcgtgcgtgacgaggatgagtgtgaccccgagttcacgaacatgtcggaacagtatgtcggcgaccatgtcgccggtttcggtgtcgagcgcgccggttggctcgtcgcagatcagcagatcgggatcgcccaccagcgctcgggcgatggccacgcgctgctgttcgcctcccgacaggcgcgacggcatgctgcacaccgtccggctcccgagcccgacggtgtgcagcatgcgcgaggctcgtcttctgatgacccgcagggggatgcctccccggtattgcaatgggagtgccacgttctcccatgcgctcagatgcggtatgagggagtagttctggaacacgaagccgacatgccggcagcggaagcgcgcccggtcggcgtcgttccacgcggcgcagtcccgcccgtcataggagagcgttccgtcatagtcgttgttgagcagcccgacgatggaggcgagactggttttgccggatcctgatttcccgatgatggcggtggacgttcccctctcgaacgatgcgctgacatcgtccaccgtcgtcaggcgttcgccgtcgggcagccggacttcggcgctcagatgttccaaccggatgagtgtgctcatgattgcgctcccggtgtgagattcggagctgtcgcggacaccatgtcaccttcctcgagaccgtcgaggatgatgatcgacgtgccgtccgatgcccccaacttcacgttcacggtggcgaacgaatctccgtcacgcctgctgacctggccggaggcgagcctgccggcgactgcggtgacaggcaggatcaaggcgtcctcgaccgcagtcgcggtcagtaccacggtggcgttctgcccgggacgcgcctgcacgtcctttgggaacaggcattgcagtgtgcgagtcgattccgtcccatgcgcagtcgtcgccgatccggccgtatcttccgctgaagagggcggagtggcgacgccgtcattcactaccgcggcacagtccgtgggcccctgcgcgtcggtgatctggaatcggcccgtcaacggctggtccgggtctatggtcgccagcagcgcggtcgcatccacgctggcgctcatgccgccataccgtatcgagaacagcggatagtccgcggccatgtcgttgtcctgcgcgaccgtttcgatcacgccgtcgaccggagccgtgacctgctgatcgccgacggtacccaacacgtcgcccgcatgcacgtatgctccttgatcagtcgtggagtggaaccagcctttcgccggagtcgtaagcgagaacacaggagccacctgcacgccggtggaggaagaggacaacggcgtgatgccgcccctacgcacctcgaccgtggatgctggccgcttcgccgtggaggaggcgtcggacgatggcgtccgcgacggcgagcaagccgtcatcatcgcgcacatcgtcgtggccgtcacgcacgccaacaggcatttgaacggtgcgatcgcattcatttcgtcagtccgttctcatgccggtaccatgtgtagtccgtggtgtagaagtcctgcatggtcgaatagtcgccgagttcggatttgccgatcacatcgttctcgtatatgccatccttgtcctcgtagtagttcttgaaccagtcggtatccagcagcttgcgcagctgctggagggcgcctcgggctgcttccgcgttggtctggctgttgtcgagaatgtcgcgttccaccgagcactgccagtagacatacgcctgtccttccccacttcccttggcatacagcgaggacgcggcctgcgccttgggtatattcgctggaaacgcatcgccgttcatcagttcaaaggggaaatcctcgacggtcgccttgtattcctcgttcgcctgctgccaggtcagcatgccgccacttcccgaggtgccgcggttcggagtcgtcccgcaaccggacagcagcatcactgcggtcagaatggcggccctgcgtcgtgttcccgatttcatcatcatgccccttcggacgattgcacaactgtcgccaaccattagcccacagacggcgatccgggagcaaaagactgtcatgcgcgcgcatgacaacgatacgtcgaggagcatgggatgcgcatacgatgggtggcatgacagacctatcggactcgcataccatctccatcggggtgctggacaacgattcgctcgccctcaacgccatagccgtgatgacgagccgtctctccccgcggttccacatcatctggagcaccacgtccccggcgatggcattgcagcgctgcatgacccacggcgcgcgacccgacgtgctggtcgtcgacatggccttgggaggcatcaccggcgcggacatatgcgccagaatccgtcggcgcactccgacgatcggcttggtgtgcgtcacctcctatgaccttgatccatatcggcaagacgcggtcgaggcgggcgcacaatgcctgatagccaaagatgacatcgtcaaagagctcccgcaggccatacgatgcgcggcacagggcgagcccgtccccggcaccggattccccaccgcacgggaagccaatcgcaaactcaacgaaggacacgcgaccgagggccggctgccggaaaacgacaagccatcgctgtcctccagggaacgggacgtactgcgcctctacgcgcatggatcatccaccgacgagatagccgcgctcctgaatgtcagcaagggcagcgtcttcacctacgtcaacagggcatgccgcaagctccatgccgccgaccgcaaggaggccctcgccatatgcgcccgatacgatctgctctgaaccgtatacaccacccagccatactggccgcggggctggtcctcgcagtggcgatccctgtagagatgggcgtgtactcatcccagaacctgctgtcatggtcgaccatacgcatatcgctgctcgtcgccgtcctgtgcgccatgctcggagcggcaccggtatgggccgcctgtctgctgttcgcggtctcaggatacgcgttgctgtggctgttctcgccgttgacgaccatcatgatcgccgcactgacctccatagcggtcctctcgttcgtcaaaccccgccttggagccgcttccgcactggcggccctcgccgccctcgccgcgaacaacatgcagaacaacctcacctcgtcgaacatcgtaggcatgatcatcatgtgcctatgcccattgtcgctggggttcagtctcaacctgctgttcgcccaacggcaggcgaccgcgacactcaggcaacgactcgaccgcgaacacacggcgcgtcacctgcacgataccatcagcaacgacctcgcctacatgatcctgcgcatcgaccaggcaagccgcagtgattgccccgccgatcgggagcaatatcagcgccaactcaccgatctgcgcgccatcgccgaaacggcgctcgaccacacccaccaggtgatacgacaacttgaacgcaccgacaaaccagacgatcgcagccgcatcgtcaaaacaaataacgacgacaaaaccgacaggaaaatcgaacagcagcgtgaacggcttgacggcatcattcaatcgcaacgacgtcgccttggcggcctcggattccaaggtgacgacatcctcgggacgttcgaccatccactggcggacgacatcctcgaccttctcgaaggactgctcaacgaactgtacgcgaacatcgccaagcacgccgccccgcacgaatggtacgccgtcacgatctccttcgaccggcggcacgtcatcatttcggcaagcgacgtactaaaggacgaagcggtacggctcggactcggcagcggcctcaagagataccgaaccgttatcgaatccatgtccgggacgttcgacatcaccgatgattccgacaactggaacgcgaacatcaccattccattgtctgtaacacgccggtaaagggaatgacggcctccagctgccagtgggcttgttcggtgtccggctggcttgcgctggtgtgtgttcttcgagcgagtcgatgacctcgtgcgtgtggcccatggcccggctggcggcgtcgcgcaattcgtcgagctgttgctggtattcgtgttcgtcggcgggcatgccgtcggtcccggcgtgaccatcgggacatccagcatgaggattacgcccgtgacaagcgccggccacaggaaccggtccgggcggaacatgccgccgaccaggccggcaagcacagccagagccaacatgatatcgcgtacggtcgcggtgccggggacccgtgccgccatcgagaacacgtactccgcgagcaccgccacggacaatacggcgcaggacgccgcgatcaccggatgcccggcatgccgcaggccaagccggtcggaaagccggggcagagcagatcgtatctggcgcatgcgtccagcacctccttgcggctggcgactcccagcttgtcggccacgcggtgcacgtacgtgaacacgctgcccgtcccgccgctcctgcgacggatgcgccggcacacgtcagcgcccgtgattttcccccccaacgccatatccgacaccagcgcatccggcctggtatgcgggttatggcaatgctcgatcgccaccgcgggcgaacccgtgccccacatgacatggaagtccttggatacggccgagatcatcgcgcacatcgcatccagggcgaacggatcattgtccaatacgggcgatacggatcgaccgcgccgcagccccggtcatgtcatcatgtcccatgccgctcatcgtggccacggtcgcagccggacaaaacctgctatcatgcgattacttgacacgatgttgcgcttgcgggcgcgaacgggcctgtctcgttaagtgtgtaaccggcgttttcattgttgtgttccctcgcttggccagcggtcggcgaaggtgatggcaaaggcgttgagcgcgggcttccagcgcgcgctccatcgtatccgtcccttgccggtggggtccagcgagcggacggtcaggtacatgcacttgagcgcggcctgctcgtcggggaagtggccgcgggcgcggatggagcgcttgaatctcgcgttgagcgattcgatggcgttggtcgtgcagatcacgcgccggatctccacgtcatagtccaggaacggtatgaaccgttcccacgcgtccatccacagcctgcggatcgcgggatatctcgcctcccacttgtccagcatcgcgtcgcgggccgccgccgcggcggcggcgctcggcgcggtgtagatgggtttgacatcgcgtttgatggcgtcccagtccttcttcgacgcgtggcggaacgtgttgcgcagcagatgcaccacgcaggtctgcacgatggccagaggccataccgcgcccaccgcgtcgggcaggcctttgagcccgtcgcagatcaggaagaacacatcgtccacgccccggttcttcagctcggtgagcaccgacagccaatagcgtgcgccctccgcggcgggcgacgcccagatgcccagcacgtcgcggccgccctccagatccacgccaacggccacgtagaacgcgcggttggcgacctgcccgtcgcgcaccttgacgacggtcgcgtcgatgaacacggccgcgtacacacgatccaggggacgcgagcaccattcgtccttctcggccacgacccgctcggtgatgcgactgacggtctccctggacacgtccgccccgtagatctcctggaagtgggcgctgatctcgccggtggtcaggcccctggcatacagggacagcaccacctcgtccaccccgggcagccgccgctgccgtttcctgacgacgaccggctcgaacgagccatcgcggtctcgcggcacctcgatcctgaccggacctaccgaatcggtgaccacggtcttggcggtggtgccgttgcgcgtgttcgcggccctgccgtccttggatttcttgtgcttggcgcggcccaggtgctcggccatctccccgtccagggccgtctccagcacgcttttggtgaactgtttgggcagtccgtcgggccctgtcaggtccagtcctttttccttggccatgcgcacgaatgtgagcgccgcctcccgctcggcgttgcgtttttccgcgtccggcttcttcgtcggtgtcatgtttccccttgtcccagcagacatcgtccaccagcctttccgaccggccacacgaccggccagttaaggccagttacacacttcgagagacagtcccgcgcgaaggattgaattggactaacgggttttatgtagggatgccgaggaggacaaccatgaatcaggggagggctcgactggaacgaattcggtgatggagggctttgcgaaatccccggtcaatcgatttgctgactggttgggatggggattcgtcttcctcggagcgggtataggagcgtttctgggtgtcgtcgcgtacgttcaacactggattagctgacggcttcgaatagttctccgaccgcttctcggatttgccgggtggcatgaggttttcgaccgctcacgtagtggcggcgacctcacgctaatcagtaatacacactttgatctagcagaccctacggctaaggctaggaggccgacgatgggaaaccgcgtatggaaaggtgaaccttccgccggtggccgggccggaacgatcatcgctttgggtatcgcggcgttggtagtggcgggagtatggttcggatggactcgatactagggctatagtccggtttcgaatctgtcgcagacgttctcgatctcattttccgaggatgcgcgggcaatcgtcagcaaggacgaggaaagctttcatggggacggataccggtacgtgaaggtcgccgctgacccagaacaagtcgacggcaccattctggacggcagggattactccagtggccaactgccccaggagaacatccgcataatcaaggaagcggatgcgaccctgcgattgaacctgggaacacagctcgatgcgctctacgaccggcctcataaggagataaccaacgagggcggcacgctgatcatcatccatgatgccgattcctcggaatggcatttcttcgaatgcctcgtctgaaagctgagcactcccgaaacatatgcgattgtcctgaagaagagcccagaccaaccaggccccgattatccagataaaaagaaacccccagtgcatcacggctgagtcgaagaccgtccggagaggccctttgggggaattcttgatatatcataatgagccatgagccgacagtcaaattcaacaactgatttcctctcacggactccaaggaaaggaagtccgcgggagaaggcgctgcgcgcgtgcattaccgatgaacggcttgccacctacaattatgaggctcaaagacgttcatgcccagcgctagagctgtacctgtgggatcacgacatggccagcgcctgtatgggcgacatcgccatcctcgaggtcgctctgcgcaaccgcatggaccggcaactctccctcctcgctctggagcagaatggcactgaagactggtatatggcagggctacaattcgatgaccgaacccagtaccagattcgtgaagcgtggaaccatctcaccccgcaccagcgaaaaaatcatacgcatggccatctcatagcgtcattgacattcggattttggcgcaatctcttggaagacggcggaacaatccacacgaagtggccagaccagcgccgtgcagattatgagaacgatttatggcgcaaaggactcgataagacattctccaatgggcgccagtatgcccgtgcagtggaagaacgctggacgagaaagtacgcgctggatatcgtaaaaacagtgcatgccctgcgtaatcgggtcgctcaccatgagccgcttgtcaacggcatacctctgccgggtgagaatcgacggattgcattggagaatgcgacgcaggcgtgcttcgctctggcgatgatcctggaccgagacctacacgcatggttgatggataacagcaagatgaaacttgtgctcgaacacgagctgaagcctaatgaataggtagtgagtatcgttttcgccaatcatctcttcagtgggaatggcaatgagctgcagcgacaccaacagattccttaggatccgacaccggcacgtccggcctggtatgcgggttatggcaatgctcgatcgccaccgcgggcgaacccgtgccccacatgacatggaagtccttggatacggccgagatcatcgcgcacatcgcatccagggcgaacggatcattgtccaatacgggcgatacggatcgaccgcgccgcagccccggtcatgtcatcatgtcccatgccgctcatcgtggccacggtcgcagccggacaaaacctgctatcatgcgattacttgacacgatgttgcgcttttggccatgcgcaggttgaatgggattgcgccacgaaaggatatgccatgaacgatctgctgattatcgacatgctgcccacgtacgggctgctgttctacctgctgatctcggtattcgtcttcgtgggatgccgtggtctgcgccggaggacctcggatcgtggcctgctgcgttttgccgtaggcgcgttcttggttgtttccgcgctcggcgccgtgttcgctgcgctggtgtatatcatggcagcgcctttggcgcagccggatatggtcgacttctaccgcatgtaccggccaggagctctgatcttcctgctgggattgttcatcatacaatttgtcttcggcgtcgctgccgtgtatcggggaaagtaacctggtatatcctgcgataaacgcattggcagacacttgctgcctatctgtaaacacaccctagataaggcttgcggccgttggtcgagcacagtagtagtgtggtctgctgtgtcaacaggaggagtatgaccaatgcggctgattgagacatggctggcggaccaggaacgcgcgtttgacttgttcgcgaaattcccggcggaagagacgggattcgagaacccggcggctggcatggaccgtgaacaattcgccgcatacgtgcgagggttgcgtgatgagtcgcttggcgtcggcctgccggacggctgggtgccagccaccaaatacattctcgtcaacgatgagggcgactatgtgggcatcttcaacctgcgtcaccggctcaccgacttcctgcgcaacggtccgggccacatcggctacggtatcgcccgcgaataccgcggccacggctacgcgaccgccgggctcaagctcacgctcgccaaggcccgcgagctcggcatcgaggaggcttacctgagtgtccacaaaaccaatccggcaagtcttgcggtgcagcagcattgcggcgcacgtatcgaccatgaggacaagacggaatactacacacgcatcgccacctgcatggagagcgatggcctctatgcgcgaggcgattgacggcgcctcttgcgtgtaaatggccgattatcaatcggttttaatcgatttcgcctcggtcgatagagtcgccgtcgaggaaccaataatcgtgcggatttccgcgtaacgccatgaacggcgtgagttccacgccctgtgtctcagctctgctcagcagataggcgcggataatccacggatactccagcacgcccgacttgagggtgatgatttgctccactctgctgccgctgacgccaaaatccttgccgccgttcggcggtcagacccagccggctcatgttctcctgaaattcgcggatagtcgccgcgcgttgctcactgttcaaagacatggcttcatggtagcgccggacgcgtgtgggaggtcgggctgctcactggaatacgccgtcagagtagttgatcatttcgagttccgggcccatgtcttcggtttgagtcaggccggtctcatggaagccgatgtgacggtagaaaccttgggcgttggtgttgaatccggcgacccacaaggcgagccgatcgttgccgatggcgcgttggcccgcctcaaccaaagcacggccaacgccatgacgatggcaagattccaacacgtataacgaagccagttccgcagcctcaggccgtttggttggtgtgcgcggcgtttgcagaagttcggcaaacccaatcacgtgattgttctccaaagcgaccaatacgacctgattgggatctttggcgtggctgcgcgtcagtttgagcgcgaattcgggagtgatcgcatccacgatttcctgcggaatatgcccttgattcagctcacgccacgtgcgcgactgaacttgggccttttcctcaaaccattgcggctcaatcggaacaatacgaatcgtcataccgcccatagtaggtcggttcgtgagcgccgtgacgcttgttgtcatgtgattgcttggcatcaggttgtattgaccgtaatggaggccactggatcagcgccggaaactcatggaattcgggctattatgatgggagtaagaaaagcacagcacaattgaacataaagacgatctggagcattgcatgagcgtcaatacggcatttggaatcagcgatttgcccaaagcggagtttatgtttcccgggcccgaacgcgatcgcttggtgaagctcattctggacggcgtaaaaaccgccaccgctgcgctgatgattgaatatgaggaagagagcgaaccgttgccatgcgttggcgcgcattcggcgttggtggattccgatgaacgacccgtagccgtacttgtcaccactgcggttgacgtgatcccgctcggaaaagtcacggaccggtacgccgtcgatgaaggtgagggtgacgtcacggcggcccaatggcgaagcacgcacgaatctttctggaattcggcggaataccgcgacgaattcgccaacccaaactttccgttgaacgacaactcgctcatagtattcgagcatttcgaagtcgagcaacggttggagtcgaataacgcattaggttaggcgatagcaaaacttttcttcaggcaactctccgagctccgcaacatctgaaggagtgcccatgtccactagagcgacagaagcggaaagtgtattgaaggagcatgtgggatatcttccggtatcggaaatggagcgtcgaggagtttcccgcacggagatttcgcgattcgtgcgtgaagccaagcttgagaaagcggcaaagggcttatatgtttcaccgaatgcggagtccgatccgctgttcgaattgcagtatcgatatccgaaagccattttttcgcatgaaactgcgttgttcttgcttggagagggggagcgagcccccctgacaccgacgattaccttaccgcaatcatcaggtacggctcgtctcaagaatgaagacgtaacagtgagaaaggtggccgacaatcgctttgcaattggcctggcgtcggctatcaccatgttcgggcgtacggttcgcgtttatgatttggaacgaaccatttgcgatttgttccgctcccgcagcacagtggatccgcaagatttgcaatccgccttccagaattacatgagatccgcgcacactgacttggtcaaactcatgaactacgctcgcgaatttcggctcgtgaacgtgatgcgcccttacctcgaagcggtgatgccggcatggttcaccggcgaattcatcttgtaggcagattcagcatcttgtaggtagctggccttggcgagaggtcattgcaatggcggtattccgatcatcgccattggaatcatctgcctacaagagcacgaaacaccctacaagatgagacgggccagttgggtcagtcccattcatcctgccggttcgcaggccgcaattgtcagtcacaactggtgcatcttcctcatccatgcgaatgatacgaatcgcctttcatcccaatgatttcgctctcatggccgatacccgcatgccgtcatgttccgtaccttggaatcagaagtcgagagtcatggtccgaaaccgaacggagcgggccgaagcagggagcattgaagatgggatttcttaagaacttttccgaaccgtttgcgttcgcgctggcattgtggccgtttgtgtccatgctgctgacggtgccggtgctggcgctgctgtatcaccgcgacaatcgcatccgactgtcgtcggccatagtggcgtatggcacggtgctgtatctgctcggcctgctgtgcttcacactgtatccgatgccggccgatgcggcggcctattgcgccgcgcaccatctgacaccgcagatcaacccactgcagttcatcggtgacatccgtaccgatggtctcaccgccgtactgcaaatcgcgtttaatatcgtgttcttcctgccgttgggcttcatcatgggccgtatctggcgttggccgctgccggttaccgcagtactgtcgttcgccacgtcgctgtttctggagacgatgcagctgaccggcctcatgggcgtgttcccgtgcgcctaccgtctgttcgacgtggacgatctcctgtggaacacgaccggcgcgctgatcggattcgcgctggccatgctttcgctgcgcctgattccggcgcgggtcgccgatatgacgccgaccaccacatctggcttcatgaggcggctgatcacgttcatcatcgacatgacgctgatctcgttcgccgtgatgccgacgcatctgttcgtcatgatcgtccgctcgaacctgccctcgggctccaacggctcatggcagtcgatggaaccgttcgactggaccggctcgatcctcttcctggcggcgctcatcctcttcgagggcgtggtgccatggttgcgcggcggctgcacgttcggcggcggtttcacgcatatgacagtggaaacccggccgcgagaaggctggcggcgtgcggcgttctatgtggcgcgcatggcgacgctgatcgccgtggtgtggtggcatagcggcggattcaatctgctggtgttcatcggcctcggcatcttctggatggtcaagcatcagatgccgtacgacctgatataagacgtaattcgccgaaaaagtggggctcttggctttcaaggggctgatttcgtccggtggggacatctacttggctttcgaggggctgttcaaacgccgaaccgcgagtataaacggctttgtggcaacgacataacgccatttcagagccttgtctacttgggcatcagccccttgaaacgcaagtagaccgccggcgaacgccgaatcagcccctcgaaaccgagttaggcattctttcgcgtttgagctgccgttcgagggcgtaatagaccgcataacagcaggcgacgaacggaatcatgcaatcagggtcgaacgttgcgtctcatcgagcaccacgagcaccagcgcgccgatgcacatcacgatggccagccacggcagcaccgggaaaccgggcgcacggtagtcgagctcatcggcgctgtgcccgtccctcgcccattcacgccggaaacggatatggcacacgcacacggagaaccacaccaccagcgtcgccaaaccggatactgcgaccaacaccaaattacacggtcgaggcggcgagcacggaagacagcagcgccagcagcgaacccgccatgctgaacagcacggcccacaccggcacaccacggaaattcgtcttggcgaatcgcgcgggaatcagccgctccttggccagcgaccataccatgcgcgaacaccaccacaatgaacacggccgaccacacccaggacggcgaatgaggaaaccatcgctgcatcagcagcccggccgccgtgaactccgatgcgagcgccaccgcccagttcggccaatacaggatagcaatggtgaacgcggtgccggggccgatgaaccgcttcgcatacatgtggaagctgccggcatacggcatggccacggacagttcgcccagcgagaccatcacacagtagacgagcagggagccgaccgcgtaagcgaggatcgcgcccaacggccccgcctgatgaatcgtatagccggagctgacgaacagaccggtgccaatcacaccgcccagggagatcatcgtcaggtggcgcgactccatcttccgttccaggccggtatcgtccttgggtgtgccggctgccgccatgctcgggtctcctttggtcgggtgaacagttgtgtctcatgtcggttgtgcgggcggcgctcgatgcctcctaccatatgatagcggtaacacgaacagcgagtggaacacgaggaatttggaatgacggaactgtatatcggatcgcatctgtcgacggccggcggatggaatgcgctgctggaacgctcccatgaggagggcggcaccgcgttcgcgttcttcccgcgttccccgtacggcaagcgttcgaaggcgctcgacccggccggtgcggcggcgttcggtgcgcgtctgaaggctgagggctatgggccgttggtcgtccacgcgccgtacgtctacaatctggctggcaaggatgaggccaagcgcgcattcgcgatcgaggcgttggccgaggacatcgagctgctgaccgccatccgcgaggccggccaggaggtgtatatcaacattcatcccggcgcgcatgtgggccaaggctccgagacaggctgccggctgatcagcgagggactgaatcaggtgttcgagcgtgcggatggcgtcatggtgcttctggagaccatggccggcaaaggcacggaatgtggccgcaatttcgatgagctcgccacgatcatggatggcgtggagaataaggcgaacgtcggcgtcacgttcgacacctgccatgcgttggatgccggttacgatttggagaatgactacgacggcgtgatgcgccagttaaatgaggtgatcggcttggcaagggtcaaggcgattcatgtgaacgattcgcagttcggcctcggctcgcataaggaccgtcacgccaacatcggcgaagggcagctcggcatcccgttcttcacgcgactggtcaacgatccgaccatggccaagctcccgatgattctcgaaaccaaggagcagacgccgaccacgcaccgcgacgaaatcgcgctgctgcgcggtctggtggactgaaccacatcggcagttcagcaccaccaccggcagcaacggcacctactggtccgcctaccaacggtgacatcgttgtcatgcgaacttcatgtaccacaattccacaatataatttcatagttatgacactgtgatacatatatagcaagcattgattcagtgacgatctctcgtcaaagatgttccgtcaaaacaggcgcatgggctcggtcgaatccaacggctgaatcaggcgtttgccgtcgccctgcagcggggcgacctcgtgaaattgcaagcggcgggataacgcagtgcctgagttccgcacgccggcgagcaaggatgcgccgtcgattgtgcggtccagccacggcgtcccattccaagtcgagcgcgaaacgtctgtacatgcgtgccagtttatgccaatgttctgcctaagccggaatcgcctgcgaaagcccaaaatgtaggacgggttcggcaatcgggacaggacgtgacctagagtggcgcatgaccgaacaccaacaaagggaggaccatgtcggttttggacgaactggtggcgggagcgctggaggatcagcgcacccgtgagctcaccgtatcgcttgaggatgtgaagaaggccgcgctggcggccccggctccgattgacgcgacacgatggcttaagcgcgccgacggcatccccgtgatcgccgagatcaagcgcgcgtctccgtccaagggccacctgtccgacatcccggacccggccgcgctggcccgcgagtacgagaagggcggcgcaagcgccatctccgtgctcaccgaaggccgcaaattcctcggcagccttgacgatttcgacaaggtccgcgccgccgtgcacattccagtgctgcgcaaggacttcatcgtcaccgactaccagatcttcgaggcccgcgcccacggcgccgacctggtgctgctcatcgtcgccgcattggacgacgcccagctcaagcacctgctcgacctggcgcacgagctcggcatgaccgtgctggtggagacgcacacccgcgaagagatcgaacgcgcccgcaaggccggtgccaaggtgatcggcatcaacgcgcgcaacctgaagaacctcaaggtggacgtgaacaaatacaacgaactcgcggccgatctgcccgatgacgtcatcaaggtggcggaatccggcgtattcggcgcggtcgaggtcgaagactacgcccgcgcgggagcggacgcggtactggtcggcgagggcgtggccaccgccgacaatcatgaacttgcagtggaacgactagtaaaggcaggagcacaagtgaaagcatccgaaacgaccccgctcagcgaacatcagggaccgtattggggccagttcggtggccgctatgtgcccgaggccctcatcaccgccctcgacgagcttgagcgcgtgtacaacgaggccaaggccgaccccgaattccacaaggaattcatgacgctccagcagcgttacgtggggcgcccgagcccgctgaccgaagccccgcgcttctccgcacttgtcaaagagaagactggtctcgacgcccgtatcttcctcaagcgcgaggacttgaaccacaccggcgcgcacaagatcaacaacgcgctcggccaggcactgctcgtcaagcgcatgggcaagacccgcgtgatcgccgagaccggcgccggccagcacggcgtggccaccgccaccgtgtgcgccatgctcggcctcaagtgccgcatctacatgggccagatcgacgcccgccgtcaggccctcaacgtggcccgcatgcgtatgctcggcgccgaagtggtcgaggtgacccttggcgacaagatcctgaaggacgccatcaacgaagccctgcgcgactgggtcaccaacgtcaaggacacgcactacctgctcggcaccgtcgcgggcccgcacccgttcccggccatggtgcgcgacttccagaagatcatcggcgaggaggccaagcagcagctccaggactggtacggcatcgaccatccggacgcgatctgcgcctgcgtgggcggcggctccaacgccatcggcgtgatgaacgccttcctggacgacgagcgcgtgaacctctacggctacgaagccggcggcaacggccccgaatccggcaagcacgccatccgcttcgcccccggcaccggccagctcggcatgttccagggcgccaagagctacctgctggaaaccgacgaaggccagacgctcgacacctactcgatttccgcaggcctcgactacgcttccgtgggccccgagcacgcatggctcaaggacatcggccgcgtgaactacagctgggccaccgacgaggaggccatgaacgccttccgcgacctgagccagaccgagggcatcatccccgccatcgaaagctcgcacgccgtggccggcgcgtacaaagccgccgccgatctgaaggccaagggctatgacaaggccgtgatgatcgtgaacatctccggccgaggcgacaaggacatggccaccgccggcaagtggttcggctatctgaccgacgaccaggccgccgcgctcgatgtgaccggcgcccacggcaatactgtcgcctgaacaagaagaggagatttttgattatgaccaacgaagcaaccacgccgtccggccagccgctgggcatcagccacaagcccagcaagtcgggcgctatgttcaccaagttcaaggccgagaacaagcccgccttcatcggctacctgccctacggcttccctaacccggacgtctcgcttgacgccttcaagacgatggtcgagcacggcgtcgacgccgtggaaatcggcctgccgtactccgacccggtcatggacggcccggtcatccaggctgccgcctccatcgccctgaacaacggcgagaccatcaagcgcgtgttcgaggccgtcgaaaccgtggccaacgccggcggcgtgccgctcatcatgagctactggaacctcgtgtaccactacggcgtcgagcgcttcgcccgcgacttcgagaacgccggcggcgccggtctcatcaccccggaccttatcccggacgaggcgggggagtggctcgaagcctccgaccgccacggactcgaccgtatcttcctggtctccccggactcgtccaccgagcgcctcgaaaccgtggcccgcaacgcacgtggcttcgtgtacgcggccgcccgcatgggcgtcaccggcgaacgcgccaccatcgacgcctcgcccgaactcctcgtggaacgtacccgtcaggccggtgccgagaacgtgtgcgtgggcatcggcgtgtccaccgccgaacagggcgccaaggtcggctcctacgcggacggcgtcatcgtcggctccgcgctcgtgcacaccctgctcgcggacgacaacaagaccgcacgcgacccgaaggaaggcttgaagctgctcgccgccaagagcgaggaactggccgaaggcatccacaacgcccggtaaacacccggtgcgcctcacgcgggttgtgccgtgacacggtagggtagtcacagagcatcaagcacaacccgcgcgtggacacacaccatgagcaccagcaagtagaggcacgatgaatctggcttatattccctcgccgaccttctccaagttcgagatcggcccgttcactatccacatgtacgcgatctgcatcctgatcggcatctgcgtggccgtatggatcctcgccacacgttggaagcggtacggcggcaccttcgaccagattctcgataccacgctcgtcaccgtgccctgcgcactggtgggcgcgcgcctctaccactgcatcaccacgccggccgactacttcccgcccaccggcaacttggtcaacatcctcaaggtgtgggaaggcggcatggccatcttcggcggcatctccgtcggcaccttggtggcgttcctgtggtgccgccacaagcactatccgttcgcgatcttcgccgatgccatcgcccccgcgctgcccgtggcccaggccatcggccgactcggcaactggttcaaccaggaactctacggctggcccaccacgttgccgtggggcctgaagctcaacgacgcggacgccatcggcaaatccgaaatctgctattccggcgcgcaatgcccggactacagaaccacgctgttccacccgacgttcctctacgagatgatctggaacctcatcggcgccgcgctcatcatctacctcggccacaagctcgccgaccggctcaaggccggccagcagttcgccatgtacctgatgtggtacggcctgggccgcacctggatcgagaacgtgcgcatcaactactccacggtgatcctgggcctgaggaccaacgtgtggaccgcgatcatcgtcttcgtgctcggctgcatcctgttcgtcgtgctctaccagtacggtccggaccccaaggcgcaggcgcgcgggcttgcggcggtcaccgccgacgagctcgaacgccagagcatcgaagaggaacagcttcgccagaagaagcaggccaagcgcactaagtgacaccacaataaacagcgccgaaacagcgcgaaacacgggaccccaagtcccattgcacagataaggtaggaaaccatgagcaatatcgcaatcgcacccagcatcctgtccgctgacttctgcaacctcgaacgtgatctcaaggccatcgccaacgccgacctggtccacgtcgatgtcatggaccatcatttcgtgccgaacctgaccctgggcgagccgatcgtcggccgcatctgtcaggtcaccgatctgccggtcgacgtgcacctcatgatcgaggacccggaccgttgggctcccgaatacgccaagctcggcgccgcctccatctccttccacatgggtgccacccacgcccccgtgcgtctggcccgacagctgcgcgagatgggttgcaaggcctgcttcgccgtgcgtccggccgaaccggtcgagccgatcttcgatatcctcgacgagttcgacatggtcctcatcatgaccgttgagcccggcttcggcggccagaagttcctcgacaaccagatggccaaggtccgccgcctgcgcgatgagatcacccgccgtggcttgaagacccgcatccaggtcgatggcggcgtgagccccaagaccgcgcacatcgtggccgaagccggcgccgacgtgctcgttgccggttccgccgtgtacggcgccgagaatcccgcccaagccatcgacgacatccgcaccaaggccgaggccgcgttcaaggcctgagctccaagcctgaaccgcaatccacctttcatccataaccgcaagaaaagaatctgaatcacatgaagacgtttgaatccctgttcgccgaactgtccgaaaaggcccagacccgccccgaaggctccctgaccgtcgacgagctcgacaagggcacccacttcatcggcaagaagatcatcgaagaggccggcgagacctggatggccgccgaatacgagggtgcggaccgcaccgccgaggaaatgagccagctgctctaccacgtccaggtcatgatgatcaagcacggcctgacgcttgaggacgtctacaagcacctgtgagaggaacgcaaatgctgagaatcgcagtgcccaacaagggcatgctatccgaacccgcgtggaacatgctggccgaggccggctaccgtctgcgcaccaaccctcgccagctggtcgtgcaagatcccgacaatggcatcgagctgttctacctgcgtccgctcgatatcgccgtatacgtgggccgcggcgccatcgacgtcggcatcaccggccaggatctgctcaagaactccgataccgccgcgctcgagcacatgccgctcggctttggtacctcgaccttccgtttcgccgcaccgaacgaatccccgatcaccactctggaggatgttcagggcaagcgcgtggccaccacattcgataagctcgtacacgactatctggtcgagcacggcatccaggccgagaccatccatctggacggtgcggtcgaatcctccgtgcagctgggcgtggccgacctcatcgccgacgtggtctccaccggtaccaccctgcgcaacgccggcctgcgcgtgtttgccgaaccgctcatgcactccgaagcctgcctgattcgttcgccgcgtctgaacgagcaggactcacgtctggccgtgctgacccgccgtctgcaaggcgtgctcactgcacatcagtatgtgctgatggactatgacattccgatcagcaaggtcgccgccgccgtggccgtgacccccggctttgaaagcccgacgatctccccgctgcacgataaacagtggaacgccgtgcgagtcatggttcccaaggccaaggtcaaccagctgatggatgatttgtacgaagtcggcgcacgcggcatcatcgttaccgctctacaagcctcccgcatgtagactgttagtcgatatgaccaaccagaaagtcaacaccagatacagtccggaagcacgtgacatctatttcaccgtgcccaatttgatcagcgcgctgcgaatcatctcgattcctttcatcagcgtgctgatctccaagcacgagatgattgcggcgttagccctgatcgccatttcctcggcttcggacggacttgacggcatcatcgcgcgcagattcaaccaagtgagcaagatcggtcagattcttgatccgattgccgaccgactgctcattttctgctcgattctggccctcagcgtcgctggcatcatcccatggtggatgctgattatcgtgggactgagggatctgtggatggcgattcaggtgctatggcttgcccagtacggttatggtccgctgcccgtgcatttcgtgggcaaggccggtaccgcgctgctgatgatttccatcgtcagtctgattttcgccgatttgggcaccagtacgttcttccacttgctctacatcgccgcgctggccgccggcatctggggcatcgccatgtattggctcgccggatatatctataccgagcagggcatcagattgctacgcaaggaactgggggagaagtatggcgcttgaggccacggccccggtctcattccccgtacccaaggagaatgagccggtacgacgccgcgccgtgttctcccactcagtccgaggcgcggaatcacatcatgcgctttccccggatgacgccgccgccatccgcaccagacgtcgccgtaaaaccaacgacgattcgcttcagctcatcgatgatcttgtcaatcgtccgatggatccgatgttctccgactcacgactggtccatgagcatcgttcgaccttctccatctggtttaatcgcatcgtcgtattcatcatctgcgtcggcgttggctttgcctgcagcctattcgtgcaacagttgcaatccgatccgcgtaagcaggtacggcagactttggccacgcaattggagaatcgcaactcgcagatagacgaactcaccacggacgtcaataatttgcgctcccaagttgacgaacagtccaagaaaatatccggcagcgtgaaaagcgatacgcttatccaagacgaaatggtcaatggtgccacggtggtcgaaggcgaaggaatcaccatgacgctggccgatccaatcgcggcaagccagtcggatcaatcctcctcgacgagagtcggcacctccacgaacatccgagtcatcaccgatctggatctgcagcaactggtctccctgatgttccaaaacggagccgaagccattgccatcaacggtaataggctcggcgcgcaaacctcgatacgcaaggccggcgggcatattctcatcggcatgaccgcgatacaaagcccctataccattgaagccataggcgataagagcgccttggccgaagcgatggggaagaagaaacttgcaagtctttacgattccttcaaggaagccggtatctacccgcaggtgagcaaatccaattcgattacacttgaggcagcagtcactggcgaagtgaagtacgcggaaaggaatgaataatggcagccgttctgggactaatcatcggcgtcgtcatcggcgtgttcgtcaagccggacattccgatcatcgtgcagccttatctgccgattatggtggtcgctgctcttgacgccctgctgggtgccgcgcgagcctatttcgagcgcagcttctccgaccgcgtgtttgtgatctccttcctcgccaacgtggtgacggcaacactgctcgtgttcctcggcaaccagctcggcgtcggttcgcagctgcagacagccgtcatcgtcgtactcggcatccgcatcttctccaacgtgtccgcgatcagacgcttcatcttccgaggctgacaagggtactgacgtatggcacgtaaagcacaatcagacaacatgctggagaaaatgcgcgaccagcatgcacaagacaaggtcaacgaccggatggaaaccgggtcgtttcccacggtgcgtaagaagccccggaaggatctcaaccgtgccagcaacaaatcacggttactatcctcgattctcatcgctctgatgtgcgcgttgttgggtttcgcctacatgagccagatcaataacactaaatccacgtacgaaacgatggacgagagtgaactggtaaggctgctgaacgagtcgaatacgcaaatctccaatctcgagcagcgtaaaacccagttgaacagccagctcaactcgctgaaatcggcggctaacgagcaggagcaggcgcgtaagatcgccaagcaaaacgaggagaccagcggcttgatctccggcagactcccggcaaagggtcaaggcgtgaccatccgaatcggacgaggcttgacgactaaagtggacgcctcaatcatgttcaaccttatcgaggaacttcgcaatgccggtgccgaggtaatcgccatcaataacgtgcgcgtcatcacctccacctacattcaggacgccgaggaaggtttgatcgtggatggcaccaccatcaagcccacatacacggtgaaggccattggcaatccgcaggaactgtccaacgcagtcgatatcgccggcggtgtgggcgctcagctccaggtgaaatacgggtccaacgtcaatgtacagccttctgacagcatcattatcgacgaagtacgcgaagctacgcaaaaccagtatgcaaagacggtagaataggggattatgaccaacccgattcctagcgcaggcgaaaccaccattatcggcctgcccgcgattaatgtactgcccattaccaccaccggcgatcgaccgctgactcaagaggatctggacaccatcaccagattgtccgagggaacggcattgctgatttccgccaggggagcggtctcaggttctcgttacttgcttgacgaggatgaaatcaccgtcggccgtgatccgcgagctgatattctgctcgacgactccaccgtatcccgtcagcatgccgtgttccgcagggtcaacggtcagttctttgtggttgacgcaggaagtctgaacggcacctacgtgaaccgtcagcgtgttgatcaggcgacgctgaagaacggcgacgaaatcatgatcggtaaattccgcctcgtgttcttcacgaaatctgccattatttcccaatagtccacacccagcacggggttagactgattgcagaaattgcaatcatgtgattacaccagtgtgagtcatatgcgagacacgcatgagttaggggagtgccatgggacagaccgggctgcatcttcatgtttcgcttgaggaccgtcagaatctgaacgctgacgcgattcagggggagttgttctccaacgtcgatactgaggagatcaagcgcggctaccgtggcactgtggcctccaaggtggccggcatcacgtaccgacagctcgattattgggcacgcaagcagattgttgagccgtccatcacgccgtctcatggctccggttcacgacgactatactcgtttaaggatgtggtgattctcgctgtatccaagaagttgcttgatgccggtgtgaatctgcagaacgtaacggcggccatcggattcttgactcaacgcagcaccgatcagctggccaatgtgaccatcatgtgcgatggtcaaaacgtacatgaatgcacaaccagcgaacagatgctcgaactgttgcaaagcggtaaggcagtgttcgccgtgtcggtgggttcgttgtggcaccagattgagacggccttggaacaggaagaatatgttgatcttgaggccaagccgctgacgattgccacgggccgtccgattgatgaactgactgccatgaggatgcgcaagaagctcgaggcacagcgcttgcaacgcgcaaccgcctgatacatgtatggttgttggcgacttgccggctttggtcggcaggtcgctttgttgtatgtgttgcttttgttgcctgccatcttatgtttttatatgttgcggtgattattatgactgattggaggaccgggtgaacgggattgttgtcggattgttgccgggcgttctgtggatggtcgccgtcatctttgctgtgtccatcatcactataacggtcagccgaggccatctgttcacgccgagacgccggcgaccgccggtcgatccggtcgactggtcgatggtgaaaacgcatttcatgtcgtttgcggcggcgctgatcccgtttcccgtgttgacgtttacagcggatctgatgaatgctcgcatgctcgcgttctacgaccacgcgcaattgcccggagcaatcatcatattcgcgctggtgctgctggaactcatcgccatgtatctgcaggcacgcaacgcttcggaaaccgaaatggacaagcgtttgggcgttgcttctcaccggaataaggatgatgttgcgaagtagccgattctctgcggcgaggctaatccgcaactagatactactggttcggctaaaatcaccacatactattaaccgataatgtacgctgtgcgacagtgactcgaccgggcttcaagaatggctttattccaacggtgtgaagccatattaatcagcggtttggaccgaagcctgccaaaggtagccaaacccgtatatgacaattggctatggagatgaagcgacccacggcttcggttgcattgcccctgccgtgggtcggtttcatcatacccggcattcctgcccggcgagtttcgccaagctgacgtcgggcacatcgaaccacaacccgcacttggcgggcgacaccaactccgtgcccagaccgtgccccagcgtccatctgcggacgaaccccgatgcatcgcggtaggccgccatgccgcgctccgacctccagaagccctgccattccggcgtctcgcggctcctgtcgaagtcgaagcagccatccctcagaagggccatgagatcgggttcgacgggttcgccggtcacagggtcgttgacgaccagactcaggtcggcggcgttgcgcctcacggcggagattcgccgtgactccggcagagcgtcgggcttgaacgtcacgagacggtcacccggcaccacgcgccattcgtccgtcaggccgttgcgcgggtcgcggtcgggcaggtcggcggacgggcgcacgtcgtcggggctgaccttctcgaagggcccttcagccttccgactttcgcccagcagcaggtcgtccggcgaggcgtccgttcccgtcagccagttccacgggcgttccggcccgctccgccccacccacagtccgccgcccccgtcgcgccacagcgccacggtctccagctccttcgacatatgtgtgttttgtcaagttggagtaggccgtttcggcgtttcttttagtccatgtgagcggcgggtttcaggccgtttcggcgttggccggtcctgctggttgttggttattgcattggttattgcatgagggcgtgggtcttgcgccaggattcgccctcgaagcggatcatccgtccgtggtggacggtgcggtcgatgatcgcggcggccatgttggggtcgccgaagatcctgccccatccgctgaactcgatgttggtggtgtagatgatgctctgggtctcgtacgcgttggtgacgacctggaacaggagcctgctgccgtcctcgtcgatgggcacgtagccgagttcgtcgatgacgagcagcggggtcctgccgatcgcggcgagttcccggtcgagccggttgtccgattgggccctgaggagccgcatgaccaggcctgcggcggtgaagtagcgtgcgggtatgcccttgcggcatgcgttcctgccgagcgcgatggcgaggtgggtcttgccggtgccgggagggccgaacaggacgaggtcgtcgtggccggcgatgaagtcgagggtcgtgatctgcccgcgcccgtagtcgacggggaagcggatcggggtccagtcgtagccgccgagctccttgtcggcggggaatccggcggccttgagcaggcgtgagcgtttggagcgttccctggattcgatctcggcgttcatccacgattccatgaattccatctggctgggggtcgcgtccgcgagctggtcggcgaggacctggcgggtcagaggcagccgtctggccagggtcatgatcgttgcgattctttcgccggtggacgcgcgcctgcgtttcatgtcgggcatgacgaccggcggacggtgggttcccatggtcaggcctccttcctttcccatggctgtcggggtttcatgaacacgtcgtatccggtcaggtcgggtaccgactgctcgtacggcttctcgccggcggcgatgcgccgggccatggtggtcacactggcctcgtcgatcgcgtgcccctgttcgaccaggtgctctccggcccggacggcggcctcgaagccggacgcggcgctggccttggcgatgacgcggaacgtggtcctgcgtgtcttggcgtccatgcggtcgatggcgatcctgagtttgtcggggaaatcgtcacggatggtggaatcggtccatgcgtgggtcttgcggctcaacgcgggcaggagcgtggcggggttgcgcaccgtggccggcgaatccccgtacacgcgcggcagtctggcacaggtgcgtccgtcctgggtgcggatcgtcacgtcgaacgcgcgcagacccacgtcgagagtccagccgcgccacgaggggccggcgaggtagtagttgccgtcgatctgcacacgcccgtccttgtcggccttcctcacctcccaacggatcgcgtcgtacggcttggcgggaagcggctgcatatccatcttctcaccggcgaacaggccgccgatcggcgcgcccttgcggtaatgcgtctccttggccatcgcgtcgcaacgctccagcatgtaccgggtcagttggccgtgggactctgcgttgagcatgggcaccatgatgttgcggcgcaggaacccgaccgcgttctccacgctgcccttttcgttgcccgagttcgggttgcagaacctggtctccagccggtaatgctccacgaacagttcgaacacgtgcacgacggtgaccttgtcccacgcgatccgatggccggcgccggtggcgttgtcaagcaccagcgtcagggggaccgcgcctatgtgctcgaacaccgtgcgcagccccgcgcacacgcattcggcgttctccccgggcagggccacgcagtagcgcatgttcgaatacgggaacgtgacgaccaggcaatgcacgtcgacccggtccccgccgaccacggcctgcgccatgccgaaatcgacctgcgcctcgcccggatgccacttgagctccagatacccgtccgacgggaggcgatgctcctcgcgccaccgtttcacgtaccgctgcaccggcgaatacgagccctcgtagcccttctccgacacgagtctgtcgtacacgcgcttggcggtgtgccgctgcttgcggggcatgaaccggtccgcctgcagccacccgtccaccgtcgccctgaacggatcgagcttcgacggccgcgatacggagcgctccggtccgggagagcaatcctccctcccggcgtacttcgcgaccgtgtcgcgggccacgcccacctctttcgcgatgctcctccatgacatgccatgcgcgtcaagcaccctgatacgttgttgtacggacaccggtaccgtcattcctttcctttcccgagaaaaccgaacggtttgactttcaactcgggaaactagtccaggcaggacgggccggtgttcgtttctcaccacacgctgaagtggaccagaacctgccgctcacatggaagacatccacacgctcacacggcccactttctattgaacagacacagacatatgcctgccaacctttcgacgttgttttcctatccatccaaggcatggcgcggaaagcggccggacagccaagggcatgactggttacgcggtggagttccgtatcccgacggagcatttcatgtcctcactgaccaaggtgtcctccacgacgagggcgaggcacagggcttggatacgcaggtacgcgcgtggcgtctggcgggcggcaatcgaagcgggcgcatacggagacgccggaaccgacgagaagctgtggcccgacgacgacaactcccactgccgcgccaccgtgttcatggaggcacccggcctctccgcgtatggcgtgacgatgtgggtctacatcataccggtcgggcgcatacccgacatgcccgcgtggttcgtgtccatgatgccgggggccaaaggcacgctcgcgtccatcgagctggactccgagaccgaatggctcaactccaaccagcgcaacgaggggccggagcgcgacgagaagctggcccgcatcatggcgaagggctacgactcttggaaggacaggcccgcggtgctgggcgacgatgtgatgctcgtggcggcgtgcctctgtccgcatcccgaccttccgatggattcgagtaattcggccgaggacacgttggccttcgcggcctgcggggccacgctcggcaagctgccgcagaagcctgcggccgccgtatcgacgctctcgcccaagctctcccgcccaaagcaccacggccttgaggtcatggcactgcatatgccgacgggcatctacctgcccacgctcctcaccgcctgagccgcacacagccaatggcgaaacgacaatcaggagggcccatgacgaacgacgaatccacccaaggcaacgacgaaccgacgaccaaaggcaagcgccgctggcccaaggtcgtcgcgggaatcacggcgggctgcgtgatggcggtcctgctgtgcccgaccctcctcacgctcggattggcggaggactgtcacgacaaatcaaactctgcggattcggaaccgcagcactgcgaggtttgggcgggcgactactacaccctcggcggcgggtacgaccgtctgacgctgaaggccgattgctcgatggagggcaccaaaacctacggctacggatacgttttcgactacgtgccgggctcgttcaccgaccaaggcaacggcatcaatgccttccgacgcgaaggcgcgttgtgtgacggatgcggagctctttcagcccggcctcaacggcagttgcaacgactgcccggacttcaggggcgctttgagctccagcccaccaaggactccccgacgggcgtcgtgctctacttcgcctcgcgcgacggcctcaagtcggacgactccgacatgcacaactacctagcgccggagggttacacgggataccgcggcggggatgccaaggacgacgccccgaaccccacgggcgcgaggagcgtcgcactgcgctagtcccgtaccaccggcgacaccacgcaccggattccctcgggacccttgatctcgaacggctgcctcgcaccgctcctgcgccaagcgagcgtcacctcgtcgcagtccatcgcggcgaggaaatcggccacgacgttcggggccggggcggcggcctccacggcgaacgccgaggaacccacgccgccgaacgtggaggtcaccttcaccaaggtgaccgacggaacggggttcggcacggccgaccagtgctggctcgactcggccaacggctacaccggaggggcgaacgccgacaaaccgggtgacaacaccgcagccgacggcgttgtgtgctccggcgactacgtggaatacgagatggacctgaagttcaagggcggtgtgaacaacagcgtcaggctcgtgccgtccgcccccgaaggcttccctctgagctacagctccggcaaggggagcttctgccgctccgagggccagttgtccgccaaggggtacaacgggggcggctgcacgttccgggccccagacggctatacgaacgaggtgaggcagaccctctggtacttggccgacaactacggcggcaagccgctgcggggccagaccatgaccttcgatctgtacaccggcaacgacgcggacggctgggccaagtactcaagcgtcgagttggagcccgtcacggtcatctcgatgacctacgccgaggccagcgtggacaccgacgacggatacgaccttgagtggggcaaggacgccaagacgctggagggcacgttgaacatccacgcggaccccatacgcccgaaggcgtcccagacggccaagggactcagcaaccgctctatcggctggtccggcacgctcgacctgagcgcgttccccacggggacgtacctcaagggcgcttacggaggcaagaccttccgccccgctgacggcaagctgcatctggacagcgccacggacggcaccagcttccgcatcgtgctccccacgccgaaggcatgcggcgacggggagtaccccgaacggcaggccggagtcctgcatcgagggcaacggcaggctctcctacacgctgcacatggacttcgacaagggctccccggcctacccggacggcaccccggcgactccggtcacgaacgacggcagcgagctcggcatcggcaaaggggaggactacgacaccgggtcggtgggtttcatcggctactacggcgatgacctgagcggccgcgcggggtgctccaacaacaactggggcgtcgtgcatgtgacgcgcagggacatcccggacggcaaaatcttccgcaagctgctccagacctcgaaggccgaggggcagacgatcttcgaggacggctacaccaccttcggcaagggcgacggcgaacgcacgctgaactacaagtacaccgggaatagttacattctggccgagaaagtggccgcaggcaccgagattcgcgtccggttgcagatcaacgccaaggaggtcgccgggtgcagggagtcgggctgcaagctgacgttctacgacagtttcgactataccaataagttcctcccctccaaaggggtcgtcatacggaacggcgacaggacctacaccgacggcgtgaaggtcgcgtggaccgaagtacctgcggtgcagggcgacgatgacaaggagccggacacttggcatttcaacagcacccccgacgacgagatgccggtggactggtccgacggcatgcccacggaggccgacgtggaggaagccgatgacatgtccgtcaaggcttcctatgagatcaccccggagcaggcggcgagcgacgacccgtgggaggccgtcttctacgtgaggatgcaggagggcaccaactacagccaagaccacatgctcggcgtggtcgagaccaaggacggcaacgccgtcaagggcaactactccggcgctgtggacggggtgtcggtcctgccgatgtacgccaccgcgtccgagtccgtctccgtcacggacgcgcagggcggataccgcaacgccgcgcgtccgggcgacacgctcgaatacggactgtcctcgaacgtcaagaacgtcaaggtctacgacggcttcaaggcgcggttcacggcctgcgcggacccgtggctcaccgggttcaggctgcccgagtacgagaccgacgagtgggacatgaccgcgctcgacaagtccaaggccgtggagaacggctgcgccgtcggaagcaccccgctgctgttcgaccacaagggcaaggcgacctacacggagatgtccctgagcctctactggaccgccaaggtctccaacttcgccaacgcctcccgcaccatctccagcccggcgagaatcgaggcgagcaccccggcgtcgcacggtttgaaggccgataaggccgtcagcgaatggtcgtccgaccccgcgcccgtcgaatcccgcctcggaacggagggcatgctgacctccgcgtccgagagcatcacccgcgccgaggccggcgcggacggattgcggtacgagtggaacatctacaacaacctgaccggcctcgcgggcgaggtgagaaccgtcatcaagctgccgagcaacgacgactcgaagctcgccaacggtggcaaggggccggacggcacttggaacggctacgaccgtggcggctccaagttcaccgactacgtgctcgcgggggagccgcggcttgacgacgccgacaccatcacctcgcagggcgagcaggccgccgcttggctgggcggcggggactgggacaccggagaccggctcgccaaggcgttcgacgcccgtttcgcggccacgttcgctaacggcggcggcgaccagagcaaggtgggtctggccgacctcgttccgctgagccgcgagatcgcttcccgtggcgaggacgcctcgctggcgatgatggtccgcaacatcgcggtgcatgccaaagcgggcgaggacgtgtccggcgacgtcgccgtgctgtcctattggataccggagctgcccggcatgaaaccggacgacatgctggaggactggcgcgggcacgccgacgagacccgcgagtacatcaggttccttcaggacctcgggttgcaggccgagggcagcgtcgagacgcttgacgccgccgacatggactgacctcttccacaaaagaaaaaccaccgttttgcaacggtggtttttgtcgctcagctcgccttggcgaagccgctcgtcgacgcggcgatgacgctgatggcgctggacgcgtggtattcgcgcatggcgggcatcgagccggattcgccggtgatgtcgttcttcaacacgtatttcaacgatgatttcatggcggaacgtttccagacgatgtctctggatccaggcaaggccggccgcctgtgacgcctgggacggccgcggtgggtgttaggaaaccgttaacaatccgtccgtgggcgtatgggttccgttagattcggagcatgacttcgctcagggctatatcatcaagatgcttattggaaataggtccggccgcgcccgcgaacgcggcggcggccggaccgtgcatctgatgattggagaagagtaacatgccttggtgggttgatgccgcctatgtcgtgggcgtagtggcgctgttcatcgccttcgacctgatcgcgaaggcggtggatcgtctatgatggctgttttctgcgccatcggcgtcgtattgggaatcgccggtgtggtgtatatgggggtcgccctgtgccgcccggagcggttctgagggccggggaagagtcttaaggttccgaaatggtatatctctatgcttttatggcgttcggtttgatcgccttgatcctggcggccatataccggccgttgggcgattacatgtatcgcgtgtacacgaccgataaggatctgttcttcgaaaagtggatctatcgcatcatcggcgtggatttctcgaaaggacagtcctggaaggcgtatttccgcggagtgcttggcttctccgtgatgagcctgctggtcctgtacctgctgcagcgcgtgcagtcctggctgccgttctcgctgggcttcgacaacgtgccggctccgctggcgttcaacacggccgcatccttcgtgacgaacacgaactggcagtcctattcgcctgaccagacgttgggctattccgtccagatcgcaggcctgtgcgtgcagaacttcgtttccgccgcggtcggcatcgccgtatccatcgccctggtgcgcggcttcatgctgcgccgctccgatacgatcggcaatttctgggtggacctcatccgcggcacgttccgcatcctcatgcccctggccatcgtgatgggcaccatcctcatcgcgttgggcgtcgcacagaatttctcgggcttcaccaccgtcgccaccgtggctggcggcgaacagaccatcatgggcggcccggtggcctcccaggaggccatcaaggaactgggcaccaacggcggcggcttcttcaacgccaattcgtcccatccgtacgagaacccgaacatgtggaccaacctcatcgagatcctgctgatgttggccatccccgtcgcgctgacccgcacgttcggccgcatgatcggcaacatccgtcagggctatgcgctgctcggcgccatggtcgtcctgttcggcatctccttcttcgccgtcgtgagcttcgaatccttcgtggacgatccgctcacctccctcaccggaggctccatggaaggcaaggaggaccgcttcggcatcgtctggtccgcgctgttcggcaccacgtccacaagcacgtccaccggcgcggtcaactccatgcatgattcctacaccgcgctcggcggtatgatgtacatgttcaacatgatgctgggcgaagtctccccgggcggcgtcggcgcaggcctgtatggcatcctcgtcatggccgtcgtggccgtgttcatcgcaggcctcatggtcggccgcacgccggaatacctcggcaagaagatcggcccgcgcgagatgaagatggcctcgctgtacttcctcgtcatgccggtcaccgtggtgctgttcgtggctctgagcttcgccatcccgggcatccgcgaagacacgttcgcggccctgaacaacagcggaaaccatggtctgtccgaagtggtctacgcgttcgtgtccggcgccaacaacaacggctccgcattcgcgggcctgtccgccgacaccccgtggctcgacacgatgatcggcctggccatgctcatcggacggttcctgccgatcatgctggtgctaagcctggccggctcgctggccaagcaggatgtcgtgccggagaccgccggcacgatgaagaccgacaacaagctgttcgttggcctgctcgttttcgtcattttcattatttccgcgctgacgttcttcccgacgcttgctctgggaccgttggcagaaggtttggtggcataacatgtcttccgcgaccgcaaacgacgtcatcaacgacgtgcgtaccagcaacaacgcatcgttgccggcgatgctgggcaagagtctgccggcggcgttcaggaaattcagtcccgccaagatgcggcacaaccccgtcatgttcgtggtatgggtgggcgccgcattcctgacgctcctcggagtgttccagctgttcattccggaactgtgcgcgggcgagccggtgtatttcacctggatcatcgccgtgtgcctgtgggccacggtgctgttcgcgaacctcgccgaagccgtcgccgaagggcgcggcaaggcccaggccgacgcgctgcgcaagacccgcaccaccacgccggcccacctggtccgcggatacgatgaaaaaggcgatcccgacgcacgctcgttgtccgtcgccatcatcgaagtcccgtcctccgacctcaaactcggcgacgtggtcgtcgtcgaagccggacagctcatccccggcgacggcgacatcatctccggcatcgcctccgtggatgaatccgccatcaccggcgaatccgccccggtcatccgtgaatccggcggcgaccgctccgcggtgaccggcggcacccgcgtgctgtccgaccgcatcgtcgtgcgcatcacccagaagccgggcgaatccttcgtcgacaagatgatcgcgctggtcgaaggcgcgaaccgtcagaagaccccgaacgaaatcgccctcgacgtgctgctgagctcgctgaccatcatcttcctgatcgtcgtgatgtgcctcaacccgcaggccggcgcggtcggcacctccgtcagcctcaccgtgctggtggcgctgctcgtctgcctgatcccgacgaccatcggcgcgctgctgagcgccatcggcatcgccggcatggaccgtctggtccagcgcaacgtgctcgccacgtcgggccgcgccatcgaagcggccggcgacgtgaccgcgctgctgctcgacaagaccggcaccatcacgtacggcaaccgtcaggcatccgaattccacgcgctgccgggcatcgaccatgacgacatggtccgcgccgcggcgctgagctccctggccgactctacgccggaaggccagtcgatcatcgccctggccgaacgcgaaggccatcacttcgacatgatgccgggggcggaagcggtggaattcaccgccgagacccgcatgtccggcctggacctgcccaacggcgaccgcatccgcaagggtgccacctccgcggtggaagcctggatcgaacgcgaaggcggcgtcatgagcatcgaagtgcgcgacgctctgcacgaccgtgtcgacaccatctccgcgcaaggcggcaccccgctggtcgtggccgaacagctgtccaccggcgaagtcaaggtgctgggcgtcgtccagctcaaggatgtcgtcaaggaaggcctgcgcgaacgcttcgccgacctgcgcaagatgggcatccgcaccgtcatggtcaccggcgacaacccgctgaccgcgaaggccatcgcagaagaggccggcgtcgacgatttcatcgccgaagccaagccggaagacaagctcgcctacatcaaggccgaacaggccaagggacagctggtcgccatgaccggcgacggcacgaacgacgcccccgccctggcccagtccgatgtcggcgtcgccatgaactccggcaccgccgcggcgaaggaagccggcaacatggtcgacctcgactccgacccgaccaagctgatcgacatcgtccgcatcggcaagcagctgctcatcacccgcggcgcgctgaccaccttctccatcgccaacgacatcgcgaagtacttcgcgatcatcccggccatgttcatggacaagttccccggtcttgccacgctgaacatcatgggactgcacagtccgttgtccgcggtgctgtccgccatcatcttcaacgccatcatcatcgtgatcctgatcccgctggccctcaagggcgtgcggtaccgcgccgagtccagcgacaagatcctgtccaggaacctgtccgtgtacggtctgggcggcgtggtcgccccgttcgtcggcatctggatcatcgacctgttcgtgcgtctgattccgggattctaaggaaattaggtaagggaaacgattatgaaatccgcattgtcgttgaatctgcgcagctactgggccggcctgaaggccgtgctggtctgcacgctcgccgtgatcgtatacacggcgttgatgaccggcatcggcgctctgggattccccgagcaggccaacggctcgatgatcacgaactccgaaggtcagatcgtcggatcgtccctgatcggacagtccttctccgatgccgacggcgaagccatcgacaagtatttccagccccgtccgtccgcagccggcgacggatacgacgcggcggcgtccagcggtgccaacaagggacattccgatgaggaatatctcaagaccatcgaagagcgccgcgacgccatcgccgaacgcgaaggcgtggacgtgaagcaggtccccgccgacgcggcgaccgcctcctcctccggactggacccgcacatcagtcccgaatatgcggccatccaggtcgagcgtgtggccgaagcccgtagcatggacgtcgaagatgtcgaacggctcgtcaaggagcacaccaccggccgtggtctgggcttcatcggagagcctgtggtcaacgtcgtcaccctgaacctggcgttggacgacatggagtgaatccgactctgaggcgcatcggatacggtgcgcctcagatgtcatcaggccaaaaaactgggataatccgtagatgaaggacatcccggacggatgcggcaccgtcgtgcgcggcggtgccgcatccgtccggcttgaggccacggaacgtatggcatgcggcggaacttcgaaatggagggaatatggcggtgacgaagcggggtacgctgagggttctgctcggtgcggcgcccggcgtgggcaaaacatatgcgatgctgtccgaaggcagacggctggtcgaggaaggcaaggacgtcgtcatcgccctgttggagacccatggccgcaaagccacgcagaacgccgccaaaggcctggagacggtgcctcggcgctgtatgaaataccgtggcatgtggttcaatgaaatggatctgttcgccgtcatcgcgcgccgcccgcaggtcgccctcgtcgacgagctggcccatacgaacattcccggatgcacgcacgaaaaacgctggcaggacgtggtcgacctgctggacgccggcatcgacgtcatcaccaccatcaacgtgcagcatatcgaatcgctgaacgacgtcgtgcggtccatcacgaacagcgaacagcgtgaaaccgttcccgacaaggtgctgcgttccgccgacagcatcgaactgatcgatctgcccccgaagaacctgcgcgaacgtctttccgccggcctcgtctattcggcggaccgcgtggacgccgcattgagcaactatttccgtgtgggaaacctgaccgcattgcgcgagctggcgttgctctggctggcgggcaacgtcgacgaagcgttgcaggaataccgcaacgaacaccacatcaacgcgaaatgggagacccgcgaacgcgtcgtcgtcgcgctgtcgggcggtcctgaaggcgaacagctcctgcggcgcggcgcaagggtcgccagggcgtccggcggcggcgatctgatcgcggtgcacgtcacggccgaggacgggctgcacggatccagcccggggctgctggtgcagcagcgcgaactcgtcgaaaaactgggcggcacataccatcagatcgtcggcgaagacatctccgatgcactgatctccttcgcccgcgccaacaacgcgacgcagatcatcgtgggcgtctctcgacgcccgcccctcgcccggtggctgggtcggccgtcgtcggcgaacggcatcatcgcgaattcgggcgacatcgacgtgcacgtcgtcacccacacgttcgcggcgaaaggcatgcgcctgccgcgcatgaaacgcaccatgacgatgcgccggcgcatcgcaggctgcatattctcattgctgtcggtgccgcttctgggctggctgctcatgcaatacagcggcgtggatgcattgtcccgcgattccctgttcttccagctgctcgtcgtcatcgccgcgctgatcggcggcgtctcgtcggccactttgtgcgcgttgctgagcggtctggtgctcgactacgtctacttccagccggtgggctcactgcatatgctcagggcgcaggacgtgatgaccatcgtgctgtacatcctcataggcatcatcgtgtccttcgtcgtcgaccgggccgacgagaaggctcggcaggcccaacgtgcgaccgcggaatcggaagtgctcgccagcgtgtccgacgctgtgctgcgcagctccaatccgttgcaggcgattctcgaccgcacccgcgaggcgttcggcttcacctgcgtgcgcctcacccatgacggcgtcgatgtcgcggtcagcggcgtatgccccaccggggaggagccggacgtcatcgaccttgacgcggtcatcacgccgccgtccgacggcgccgatcagaacggcgaatcccatgacgggcagacctccgcctcacgtgatgccgcatcctccggaacgccgcggaaaacagagccgattcgccttgaactgtacggcagtgaagtcgacgcggccgaccagcggttgctgcaggccatcgtctcccaggtgcagaccgtgctggaacacgacgtgctgcagcgcaaggccgacgaagtcaagccgctggccgccgcggagaagctgcgcacggccctgctcaacgcggtcagccatggcctccgccacggctgcggtgtccggcctgaaacaggtcggcgacgcccttggccccgaaggccggcgcgaactgctcgacgtcgccgacgtcggcctgcgcgatctgacacgactggtcaccgatctgctcgacgtgtcccgtctgcacgaacgtgcgatgccgatatcgctggtggcggccgacgtcgcggaagccgtgatgcagacgctggacgagctgcatgccggtccgaatgccatcaacctcgacctgcccgtggacctgccgctggcggtcgccgacccgccgctgctgcgtcgtgcgatacacaatgtgctcgccaacgcgcaacgctacaatccgccggaccatcgcatccgcatcgcggtctccacattccgttccgtcgtgcagatccgcgtcgtggactacggcccgggcgtgcccgacgaccgcaaggacgagctgttcgcgccgttccaccgtctgggcgacacggacaacaccacgggccttggcttgggaatggcgctgtcgaaaggcttcatcgaatcgatgggcggcgccatcgacgcggaggacactccgggcggcggcctgaccatggtgatcacgctgcgcgcggcggacgagcgctatgcgatcggggaaccgttgtccgaagaggacgcgcgcgcctgcgccaccgcattggactcggacatgtgggacgtgaccgccgccgtcagcggcgtgatgctgcccctgagcgtggacgaatcacgtgacggcgaattggggcgtttcgccgacgccgagtccgataccgcggtcgccggtgacatggccgctgcggacgagcataccgacgttgccgatgtgacggctgctgagaagggagaatagacgcatgaaaatcctgattgccgatgatgacccgcagttcctgaaggcgttgcgcatcacgctgcgctcgcagggctacgagatcgtgaccgcatcggatggcgtgcagtgcatttcggcggcggtggagcatcatcccgatctgatggtgttggatctgggcatgccgaaaatggacggcatgggcgtgatccagggcgtgcgcggctggacggacgcgcccatcctggtggtgtcggggcgtaccgatgcacgcgagaaggtcgcggtcttggatgccggcgccgacgattatgtgaccaagccggtgtcgatcgacgagctgctggcgcgtatccgtgcgctggcccgccgtatcccgcagaagacggagacgccgatggtttcgttcgggaacgtgaccgttgacctgtccgcgcatgccgtgttccgcgtgtaccacgggcggaaggtgcgtgtgcgcctgacgccgacggagtggaaggttctggagatcctggtgcgcaacgccggacggctcgtgacccgtaaggatctgctggccggcatttggggcgcggagcatgtgaacgactccggctatctgcggttgtatgtctcgcagctgcgcaagaagatagaggacgacccgtcgcgtccgaagtatctgaagacggagcagggcatgggataccgcctggacctgccgtctgcgggcggcggcgaatagaggccggggacgggtgaaggcgggtggaggctgggcgggcggcgtctgtccgcccagcctcgcgttatgcgtcgtatgggaggaatcatcgaggggctgggcggccggtttgcccgctttgtttgccggtcccgcccgcttcaatcggggagaccgctgggcacgatgcgtcgaaatggctttcaggctgcgagattctgcgcgagctgacggatcttgttcggctggtggccgctccatgatgcgttcggggagatgacgacaggaatctgcttgaatcccgcgtccttgatctgttcgaaggtggacgggttctgcgtcaggtcgacggcgacatatcgcacgcccaaacgggtgagctcctgttcggtggcttcgcactgtggattgctgggattcgtgaagaccgtgaccgtcatcgggcatcctccttaaagcgcgtagtcgatatgcggtaatccgcctttcgacggagcccgcatggcgcgggctccgtcgtgggctgtccggcaggccgttcgcacagtccatgccgaaaggtctgccggaccgtctgtgcgcgtcagcgccttccggcaggagtcaacccgatatgaacaaaggactgaagaaaggtctgggcgctctggccgccgtcgcatcgctgctcgccctcggcccgctggccgcagccaacgccgcgcaaccgacgcggacacgcatcgacgccttcgccaacgacggcaccatcgccgtcgaatcggcggacggcaggaccgacatctcgaagcacaccatcaacgcctacctgctcgcgccgtacacctccgcggtggcgaccggagacaccctgaacgagtacgccgtgtccaccggcaccggctacgccgacaaggtgaccacagccgtcaaggccgcgttccccgacgccgacaagggtgcggacggctggcaggtggctctgggcgacgccaccacgacactggacgaggccaacccgatggattgggtcgcccgcaacctgctcgactcggacgcctccccttgggcgggcggactgcgcgacttcgtaaccaagctgaccgcatcgctgaaagggaacaacgccttccccgccgacgccaagacgctgaccccgaccgcaggcgcacccgccaagcagaccgcagacggcctgactccgggcatctacctgattctcgacaccgccatcggctccgaatcggccgccccgtcgctggccgtcaccacgttcgggaccgtgaccaagtacagcttcgccaaggatggacaggcccagccggccaccggcgacctcggcaaggtcgagtacaaggtgctgccgtatgagaccgccaaggccatcgagtccgtcaggggctccgcgaccgccgaggtcgcggacgacggggccagcgccaaggcgaacatcggtgacgtcatcaactaccgcgtgcaggtcggcccaatctggaccaccggctacgacgccggacgcaccctcaaggccagcgacagcctgaacgccggacagacgttcgacatctccagtgtgaaggcgtacacctacgacgccccggccgacggcggcgctctggacgaggccaccaagcagaccctcgtccccgccaaggccgacaaggacgggaaccgcaccgtctgggcccttgacgacaggggcaccaaggccgactactccgtgaccgccaccaagggcggcgacggcaccacggtcgccttcggcttctacaacgagaacaacctgctcgacgccgacgccgcgaagttcgagggcaaggtcgtggtgctcgaatactccgccaagctcaacaggaacgccgtcgtcggcggcaccggcaacgagaacgccgtcacttggaccatcggcaacaacccgcaggacccgaccagcaccgacgagaggaccgacaagacccatgtctacacgtcctccgtccgcatcgccaagatcgacaacgccaccaaggccgccatcgacggtgccgagttcggcgtcacggacaaggacggcaaggccgtcaggttcacgaagctggacgacggcacctacgccgtggccgactccaccgacatgtccgcgctcggccgcatcaccgtcaacagcaagacgctgaacggcggcgcgaccaccatcaggggcctgtacggcgggggctacaccttcaccgaggccaaggccccggagggctacatcggtctgctgctgccttccttcaaggtgagcgccacccttgacgagggcagcaacgccgcgaagatggccgtcaccgatctgggcgcgtcccgcctcgtgtccttcgatgccaaggccgacgccgacgcgggccgcgtcaccgtcgccaacgcgaagagcctcaaggacctgccgaagacgggtgccgccggcatcgcgctgatgtccttggtcgccgcggtcctcatggcatgcggagcggccctgattctgtcgcgcaagcgccgcgcgtaaacggccttcggggcacaggccccttcggaagccaaggccacggttccgggttccccggccgtggccttttccatcgctcgcttggaaggcggattatgaaacgtgacctcttcggatggctcggcgtcgtcctcctgctgctcggcgggctgacactcagcgcgccattcgtcctgcaagccatcgactccgccgggcagaccgcgagcgccgagtccgcggccctgcccacaccggacggcaggcggatgatcgaggaggccaaggcatacaacgagagccttgccggaaggccgcagtcggtgcttggcgaggccggggacgccttctcgggggcctcgtacagcggggaggacaaggagtaccgtgggctgctcgacgcggacggcgagggcacgatgggagcggtccgctatccgaggctgcatatcagcctgccggtgcgtcacggcacggacgccgccacgctggagaggtcggcggggcacctctacgggacgtcgctgccggtgggaagggaatccacgcacgcgatcgtcgcggcacaccggggtctggcggacaggctgatgttcacgaatcttgggttcgccaagaaaggcgacttgttcgagatcgacgtgcagggggagcggctgcgttacaaggtgacggatatcagggtcaccgggccggacgacgtgaagccgctcgccatcgagaaggggcaggacctcgtgaccctctacacctgcacgccatacggggtgaacacgcagaggctcctcgtcaccggcgagcgcacggatgcgccttcgggcggcgacccgggtccggtggagcggctgcccgactggctggtgccgttggtgccgttggtgccgttgtggggtttgctgggagtgtcggtcggcagggccgtcagggggccgaggagacgtcggggaaggcatgccaagaggtgagcgcccgcacagtcaagtgcatgacgagccatatcgaggaaccgccgttgcgcgacaaactgaccctgaccgtgcccgaggccggggcactctccggcatacccgcgagggtggtgagggccgccgtgctcaacggtgacatgcccgcctgctagcgggctccacgaccatgcgcatccgccgcaccgatctggacgagtgggtggcgaacctgccggttgacccgccgactccgaagtgacgcgggggataggcggtatgcgaaaaggaccgacccggtgactatcgggccggtcctatataaggattaatcggtcagccccagcgcaccggtcgcgccctcgctggcctccagcagcgcctcggtgtccgcgtgcaggtacacgttgtccatcgcgccgtcgctgtggcccatcagcgcgagccgggcgctctccggcacgccggcgttggcgaagagcgtgtccgccgtgtgcctcgcggagtgcggcctgagcctgacgccatcctcgccgttcgctatgccgattcgcagcagcgccttgtcccagtggaagtactcgattcgcctgtcgatgggcgtgccacggccggtgacgaacagcatgggggagtccacgccttttttcttgcgtatggcgagccattcgtccagcgccccgcacatcacgtcgtccaagaccacgattctctcgccgctgtccgtcttgggcggacacagccagaagccattgcccagatcggtcacatcctcgcccagaggccagtccgccctcctagagtccggtacccgctgcaactgatggtcgatcaccaaggcgcgcctgccgttcagcgtcgtcagctcgtccatcgtcagtccgagccgttcgccctgcctcagcccggtggcgaaggcgagcagccagttgagacgccacatcgggtcgggctccgcctttatcagctccgccgcctgcgcgggggacaggaccttcatcggcctgcgcctgcccgacaccggacggaccatcttggccgggttcctccgtatgaggttttcgtcacgcgcggcctcaagcgcgttcttcaggacggaccaagtgagcgtggccgtcttcgggctgtagcacttcaggccgtcctgaacgtcggccatgtccttatgacccagcgagttgatgcgcctcgcgccggctatcttgttcagccgcacgatggcgttctcgtagctgcgcctgctgttcggacgcaggttggcctcggcccgctcgtggtaccaagtctccagccagtccatgaggcgcggcgacggcgagttcggcgtgaggcctttgcgcacgtatgcgtccagcttcatcctgagcctcgcgctcgccaccgccttggtcttgccttgggccgtgagccgccgcctgcgcccggtggccctgtcgggctctatgtctatcgcggcgtgccagattccatcggcgctcttgtatgtcgagccgccgccacccattgccatcgttggtctcccgtcgtgtgaaatgcgtagccacaacgggccacccagaggcatccacagttacctgtgcgaaatgaagaccgttggaattaagccgtttctaagattccctaatagttagccgataatgtacgttatgtcagattagttatccttgacaaggattcggtcgcctgtatcaactagtccacgcataccaaggccgacagccaaaggagcaccggagcgaccaccgcaattgcaagaatcgccgtgcctttcagccaatccttgtcatctcgtttccagtggaatgctcgccaaatgaaccatatcagcatgggaatctcatacagcgacagcaatggcaaaccgatgaaaaccaggtcgaagcccgcggcgcaggctccatcgcatcccatcatgaagaagtcctcgccgttgtgtttcagtgtgtttggaaataacggtttacggcttcttcgatctgctcgggcttctcgatgatttcgtaggcaccgtgttcttccatctcaccggccggagcgtagccccagcggcagccaatggcgtccagattgcaggcgtgggcgccgtcgatgtcggtgtagcggtcgccgatcatcacggccttgtcccccgctgcagcatcaaaaccgattttgtcgaagcagtaccgaatcacctgatccttgtccaaacgagagttatccctggatgcgccatagatgccgtccaacagctcggtcagatggaaatgctcacagatcggaacgcattggtactcgggcttgcagctggccaacgccagataatagccgtcggcacgcagcttgagcagctgttcgcggataccgggaaacacgacgttcaccaagcggccgggaactttgttgccgggctcgttcggatcatcgaacacggcgcgatccgcatagtagctgcggtagatggtgaccgcccggtcaagctcatcctccggcacatggttgcgtcgcagcgattcgatgatggccggaccaatgaaacgatgcagctcggcatcgtcgggaaccgggcgacccaattcctcgaacgtcttgacgacggaggcgatgatgccgccgtcggacttggtaagcgtgccgtcgaggtccaacaggaccactttcatcggatgctgtgccattgagattccactcccctttgttcatgtcgactgctttgaatggtcgtcaaacgatatgcgacttgttccaacaatgattatgcccagtcgggatgactgggcatcaagttcacgtgttgttcagtaggagatcactcgtagtcaggaatccaaccgtcacggtgcatttgcaggcgcttttcgagtagggtggccagttcctcttcgctacggcgttccagcagcatgtcccagtgggtgcgggtgggtttgctgatctcgtcgccctcacggtcggcgtcgccctcacggtgggccacggaaccacaacggcactcccactcgtccgggatttcggcaccctcggcaaacggcaggatggtgcggtggcccttcgggcatacatacgccacatcgtttcgtgcggcgaaatcgacgttgtcgtcggactccagcgatttcgctccgatgctcatgcccctgaggctacgttctgccatatcggcatcctccttgaaagatctttaaccctactaatttacgcaacagttcggacttggccgctattccaagcttccgacgtcggctgacaaactcccatcaaacggccccccgtcagtccacgccggagtaggccaccacgccacgattgacccggtcggccgcttcgtgggcgaggcctgccagccgctctcccccgtcgaacggcagcggctgggcgacagcgatctgctgcagcacgtcagccagtcgtttggcagtgcgcacgaagtcgccgccggtcatgtcggtgccgtacaggcacgatcccagcgaaccgccatccgcccattcatacatgatgtcgagaatgccgaagtccggccgctgcatctcgtccagaccgtgatcctcgcacaggatatcgatgtcttcacagatgcccttgagcttggacgaagcgattgcgatggacccggagatgccgcccgggtagtgcctcggttcgccgtctcccccgcgtctggcctcgtataccagtgaagagagcacagcggccagtccgttggcgtcgagcttgtcgaacgtgccggcgagcagcgcctcgcacagttccaggtcatgttcactgtagatgcggcgcagcagcgagcctttttcggtcaacgtcatgtcaatgtggccggccgcattgacatgacgttcgaggtaaccaagcccggtgagaatatcgcagatgcgatcgaactgacgggccacggacccggtacgggagtcgtagcgatcggtgacgcgctgcagttcgcgggtctcgcgggcccagcggtggccccacttgaggtgttgctggaggtccgggcagttgcggcatggatgctcgtgctccgccttgcgcaaatcgcgaatgcgctggtcaaggttctggaaggcgcgtgaacgctcctgatcggtcaggaacacttcgtgcttcagtttgcggcggccttccttttcgatgtcgctcagctccatacgcagggtcatgaactgtttgaagtcgccgtgttcgcatgcgaacgcctgttcgtatccggccagcgcgttcttcagtgtgttgatctgcgattccagctgccaggccgattcgttggcctcccactgggcaaacgactggtccagggtaacgtgcgcggtctcgtagtcgctggagttgagcaggttcacggccatgttgaacgtgggtcggaagctcgagtgcagcgggtagacacgcttggatgacagcgcggcggccgtggcgggcacaaaaccgtgatggtcaaccacgatggcgtggccgatggtgtcgatgccgcgccgaccggcacgaccggtgagctgcgtgaattcgccgggcgtcaggcccacatgaccggtaccgtcgaacttctcgagtttctctaccaccacgcagcgggccggcatattgatgcccaaggccagtgtttccgtggcgaacaccattttgaccagaccttcttcgaacaatcgttcgactatctggcggaacagggcaatcatgccggcatgatgcgaagcgaagccttcttccaacgcaaagcggaacttggagaactgcagggctttcaggtcttcctgagtgagttgcccctccaccatctcatccacgatgcggcgaatcttggtcacttcctcatcggtggtgagctccagtccagcgttgatacactgttccacggcctggtcacaaccgttgcgcgagaagatgaagtagatgccgggcaacattcccagaaagttaagctcgtccaccacggcccagcggcgcggggtgtggcgttccgctttcggggcatggcccttggcgcctttgccgccgcggcctctgccgaagcccttgcgcttatcggggcgttcctcgccgcgccggcgtgcggccttgcggtccaactggtcgagccggttgatgagttcggcgttgagcttggtggtctgctcgccgttgccgtcgcggcgatagagatccagcacctcaggctcggtgtgttcgtccgcctgcacgatgacgtgctgttccaaaggcacggggcggtgttcgctgatcaccagtttggtgtcgcctcgcaccgaggcaatccagttggagaaatcctccacgttggacacggtagcggacaggccgacgatcttgaccgtcttgggcaggtggatgatgacttcctcccacacgggcccgcggaaccggtcggccagatagtgcacttcgtcgagaatcacgtagcgcagtgcgttcagcgtggtggaacgctcgtagagcatgttgcgcagcacttcggtggtcatgaccacgatgtccgcctcggagttgatcgaggtgtcgccggtgagcaggcctaccttgtccgggccgtacacgtcgaccagatcatggtatttctgattgctcagcgctttgatcggtgtggtatagaaggctttgacgttgcgttcctgggcgagataaatggcaaaatccgccactacggttttgccggcaccggttggggccgcgaccagtacgttgctgccggcttcgagcgcgtcattggcttcggtctggaagtcgtccagttcgaagggcagggattcggcgaatcgcgctgctgcggacgcccgatggcgctggactttttggaatgatgcgtaccgctgcgaagggctcagcgtctgggaatcggcattgcccttatggtgttggtgacgtgccattgctgctttccgttagttgttgaatcgcttccagcgggcccatgcctgggtgtggcgttcgcgcttggcggccttgctgcgaatcacgtccgcatgggcctcggcataacgattctgtgccacgctgagcggctgagtgaacagaggcggctcgctggtgtcggcagaggtgccagactcccccatcgcggccacgcgttcaccgagctggccgccgatgtcggacatgtctttcaaggcacggattccatgaagggctgcatagatgagtccggcaacaatcatggccagcatgaacagggccagaatcagccatatccaccaaggcatgaaaggctccttacttgttctcgctgatgctcagttcgcgttcggcgcgtgccacgatcatggtgcgcaacgtttccggggcgaccgccgtgatatgacgcgcgtgtgcgatgcagaaggccacgaaccaggagtcggaggaaacggtcagatgcaccttttcaccggcaccgcattgttcgacggtagcgcccggcaatgtcttgatgaatgccagatcgcgctgatcggtgatgaacaccgcgtcggtaccgttgtcgaaactccacttgcgcagttcgctcaccggcatgttcgggatgttgatctgcttggtgggcttgaccagttccgccttttcgatacgggccaagcgcagcacctgccagatgcgcggcttgccgttcgccttgtcgatggtcttgtctttggagacgtaggccttcttgtccttaggggcggcggaaccgacatccgtgtagacggcggcataatacacgccttcgtcgatgaaaatcttggcgggggccaccagcttgcgacgggtactaccggtaccgtcggagtactccatgtccaacagcgaatcggtgttgatcgcgcgcttgacgatggagaagcttcggggctccagctcatagccggtcaggctcagccacggggtctggcccgggctgacatggcggcgcaaacgctcatacagggattcggcctgcccacgctgcttgtccggcagtaacggcgaatgcgccaagtagctgaccgaggcggtgagcatgctgaggtattgcggcgaaatgccggcaagacgttcaaggcccaacgaattggtggcggaaacaataccctcggcatccagcagcggccagtcgatatcgaagaactggctgccagccatctcaccatcgtcggaaacggtggtcagggtgttgatgtccttatgaatgatgttgacgaatttcttgagctcgtcgtcgttcttcggtttgccgataaagcgctcggccagctcgctcatcgagaattcctcacccaggtgagcggagaggaacagcatcagacgcaggcgacgatccacctcgctgcccgtttggaaagcggggccgttcttcttgttctgggccttgatcgactcgggatcacccggctcacgaacatcgcgactaatcgacggggaaaccaccgaggcgcttacagggctggcggattcgtcagccagagtgaatcggctggcggcgtgcaggcggcgatgataggcgtccacagcctcctgcgggctgacaatcgtggcacccggatgctccagcacaaacatggccaaatcgtcggaatcggtgtaggccacgttcaggtgttcgccgtccacatcaacggtggcggcaaagcgacgcgaatcgataaccttgaccagcgagtccggaatgggctgcgtgcccaagccaggcgcaatcgaatccaaaccgagaccgggaataggggtctgcggcacacgcggcgtggtgcgcgacgcatgttgggcgagctgggactgatccggctcggaggaaatcgacatcgaacgagccagatagttggcggcggcaagcaccggcatatcttccggctcgaacatcagacggatgcgcggttcgtcgcccaactgcagacggtaggacgcgaagtcctggccttccgacttggacgaatactcaggctgccgtgattcgatggcgatgcccatagcggcgagcttggcgcgatcacgctggaactgcttggcgaacgcggccttggcggcctgatctgccagctctccatacgagtcggcgtaagccttgacgcgctgcgcaatttggcgggatgtgagccattgcgggaacgcggatgacaacacagccagtacgtccagctcgtgcttgccccatttgtcggaaaaacgccgacgtccgcttgtgccctctgccattagtcctcacgtatagttattgtttcgttataagtgcgtatgagtttcctcacactcactctatcttagaggctttttccgcacttgagcgccatttcacaaaaataatatcttttttatcgttcgaccgtgttgtaaatcacacccaatcgtccggttcgatgccttgcggaccaacgtattcgccgttcggcacatagcttggctcgcctttatcttccagtttggcgtcggcgaacatcatgacgtcacgtccgaatgtccagtcgccctgaatggaaaccgagttggctgcggccaaagatggcacggcgtaggggaaccgttcgtcgaaatcgtggatgttcttgtagtatcgcggatcaagttcgacgttcgggaagatgtaattgccgtcttccatctcatacgtgtccgtcaggtggaatcgatcggaacgcataatgaacaaatcattggtggttttcaccggaaggaagcgcatacgatccacttggacgcagatagaaccgttgaacagaccgattgcggcgcccatggcggtttccagctgaatcacctgttcggaatccgggtccgtgggattcacggtctttttgttacgaatcaccggcaacggcaacacaccatcgcattcggcgagcttgtctttcaaagcgtcgatgcgaacccagattgagttggtgttgaagtaaggatgcttggtgatgtcttgggccgcttccttatcgtccggatggacctggctcatttcacgcagtattaggcgaccagtggccttgtctcgtacaatatggccgcccttgcgatcggccttggtgcggatggccacttcagccataaacggggcacctgtgttttcgaagtgctgggccaacgtacgcgaggggcgcgcaccgagattgtcggaattggagatgaacagatacttgaagccgcgctcctccaatacgtcaagcagaccagactcccagatggtggagaacaggtcgccgtggccgggcgggcaccattccagctccgggttcgcagggtagctcacaggttcgccggtggcggccacgagcttgggttcctgatgctggatgatttccatcggcacgtcatgctgactgaacttgcgatgatgcttgagcaccttcatcgtgtccgccgaagtgtggaaggagttcatgaacgtcagcggcagttcgacgttcaggcgtgtgcgagcggtaagcacctgaccgatgatgatgtcgatgaagcgcatctgcttggccttgtgcctacgcaccggcaacagcgacttggccttgtctaatcccatggaggtgcccagaccgccattgagcttgaggaatgcggtcttggcgaaggcgtccacggccttgtcgtggttgatggtctcatagacgtcgtggaagctgggcacgtggccaagcggctcgatgtcgtcctcgcgaatccagctggaggcttcttcatggcgccacacgtcatacaaatggcggaactggttgatggcggtttcgctcatgccatgctctcgcatcttggtggccgaaagctcgaaagtctcatccacttcgggggtgtttacggtttcttcgggggtgtccgaggtaacggcgtcggtgtcgtcagcggcggcgatatccagttgggccttatcgtttatttctgtcaattcgggtccctttcgtcaaatcaataggaaccagtctagcccctgtttggggcaaacgcatacgacgggggtgcggaggcggtgaattgtcggtgataattcattacgaatggcttacaaaggtaagtccgtcgtcatgttgtctcatattgtctgaaaacggaaaacccccggaagacaaccactcaaaagtggcggaattccggggctaatcggtcgggccggcgggatttgaacccgcgaccccttgacccccagtcaagtgcgctaccaaactgcgctacggcccgatggtgcaaaagcaccgagtagataatttaccagatatttgaaatctggcaaattacgcgcgtgtcacttccgcttcttcttctcgcggatgttcacagagatctgaatcggcgtgccttcgaagccgaattcctcgcgcagggaacgctcgatgtagcggcggtagccgtgctcgaggaagccggtggcgaagatcacgaaacgcggcgggcgcgtggatgcctgcgtggcgaagaggattcgcggctgcttgccaccacgcaacgggtgcgggtgggcggcctgaattttgccgaggaaggcgttgagcttgcctgtaggaatacgctgatcccaggattccaaggccttatccatggctcgcgtcagacggttggtgtgccagccggtcttggcggacagattcacacgctcggcccacatcacacggtcgaattcggtgttccacaggcgttcgagacgctgcttgtcgaactcgtccatcgcatcccacttattgaacacgagcacgatcgcacggcccgcatccacggctgtggacatgaccttcaaatcctgatcggataccggctgcgaagcatcaaacaggatcagcgccaattcacagcgctcgatggcggcctgcgtgcgcagagaggaataatattccgcgcctgtgagcttgtgctggcggcgcttgatgccggccgtgtcgatgaacagccagtcctcgccatcgatgttgacgatttcgtcgacggggtcgcgcgtagtgccggccaaatcgttgaccacggcacgttcttcgcgcgccagctgattgagcagagacgacttgcccacgttcgggcggcccaccagagccacgcggcgcaggccggaaggcgtgaggtagccggaagtcttctcggcctgcttgagcttgtcgagcgcgacgtccagcaggtcgcccactcccctgccgtgcatggcggaaatcgagtatggttcgccgagaccgagcttccaaaattcggcggcaaggtattcgctggcctggtcgtcgatcttgttgacggccagcacgaccggcttgccggcggcacgcagcatcttgacgatgcgctcatcggtggtggtcatgcccacttgaccatcgacaacgaataccacagcatcggccaaggtcacggcaacctgtgcctgtgaggcgatggcggattcaatgccttccacgtcggcttcccagccgcccgtgtccaccagcttaaagtcggtgccggcccattccgcgtcatagctcacacggtctcgcgtaacgcccggcgtgtcttccacaacggcggcacggcggccgaggatacggttgaccagggatgatttgcccacgttcggacggcctacaacagccagcacgcccaccggcttggggccggccttgcgcgcgccttccgtgaaaccgcggccggaaatcagatcctcatcgccttcgtccagctcatagccttcgagattggcggcatactgctcgtactcctggttctcgatggcgtcctcgaccagaccgatgagcagatcgagcgtgtgggcgaagtccaaatcggaattgtcgatggtagtaacgccatcggcggcggtcaggaagctggtgaccttggaatcggccttgtcgcgcgcagccacatcctcagcacccacgcccttgacggcttggccggtgcgacgggcctgacggacctcctcacgggcggtcagcagcacgcgcacctcggcgtccggggacaccacggtggtgatatcgcggccctcggccacgatgcccaaacccccggagaaggagtcggccgacgcttcgcgggcgatgtaggcgcgctgggcggcgatgagcacgttgcgcaccgggatgacgttcgacaccttggagacatggctggagacttcggaggaacgaatgacctcggagatgtcctcgtcgtcggcgaatacgcgggggttgtccgggtccacggagatatcgaaatggtcgccggtgaagaactcgcccaccgcttcggtgatgacacgctcatccacggtttcggcgtccagatcgatgtcctgcttcagacaccaccaagcgcaggcacgatacatcgcgcccgtgtcaaggtaggcgtatccgaaatacttggccagcgccttggacgtggacgacttgcccacgccggcggggccgtcgatggcaacgcgaatcacagaccaacctccttggacagcgaacggacttccgtctgggacagcacgcggtaggaaccgggcttcaaatcaccgagcttgatcgggccgatctgggtgcgcaccaagcgcttgaccgggaagccgattgagccgaagatacgtcgcacgatgcggttcttgccggagtgcagcacgaccttgaccatcgtgtggtcacgcgaggagtcgatgatcgcgcagtggtcgagcttgatccagccgtcgtcgagctgcacgccggtggtcacgagtcgacggcacacggtgccggagatcttgccttccagcgtagcgacgtaggtcttctcgacctcgtacttggggtgcatgacgtgctgcgagagctcgccgtcgttcgtcatgaggataagaccctcggaatcgtagtcgagacggcccatgtggaagatgcgctcgtacttgtcgcccacgatgtcgcgcagcgtgtagcggcccttcgggtcgtccatggcggagagcaccttgcggggcttgttcagcgccagagtgacgtggttcggattgacgcgtacgcgcgaaccgtctacgcgcacctgctgcttatgagggtcaacgcgagttccgagctcggtgaccagttcaccgtcgacctcgacacggccttcggtaatcatgtcctcgcacttgcggcgggaaccgaatcccgcttgggcaagcagcttctggagtcgaatggaattggaatcgtcttgcgctttcgcagcgcgggaatatgcgtttggcatcgttctcccaacgtggccggacagattctgtcatcgcagagactgtcgatttgtatacatacttcagagttggcggactggaatcccagccaattccaacctatatatcataccgcaacgtaggactgctgctagactggcaaccgtttgtgcgggttcgcccgttttccaacagatgaaaaggaatgaacaatcatggaagaaaccaagcaacagccgctggctctgcgcgtgtgcgccgaattggccggcagcttcctgctgtgctttgccatttacgccttctccacatggggttcggccgtgtatggcatcaatatcgtgttcttcgcgttggctaccggcttggcatatgccgcagtcaccgccatcttctcccgcgtgtccggtggccagctgaatccggccatcaccgtagcctccgtgctggtttccacgacgaaaatcctggatggcatcctctatgtgatcgctcaggtcatcggtgccatcgccgctggcttcgccgtggtcaagctgctgcccacatccgagcaggtagctgccaaagtgtggctgactccggccgttaacggtttcgaaaacggctccgtgtcttactcgctgctgacccagtatggcattacgttctcgattacgctggcgattgtcgtcgaggtcgttgcctctctgattgtcgttgccaccgccatgtcttctctgggtgatcacggcgagtcctcggaccgtcatgccattgccatgggtcttgcctatggtctggccaccgccatcagctacccggttaccggtgccggtctcaatcccgcccgttccaccggtatcgcactggccgcgatgaatgagggtcttacgcaaaatccgctgcagcagctgtgggtattctggattagcccggtcttggccgccgctgtggtggcgttggtcatgatcatcgcgcagatgatgaccactcccaaagtgccggctgccgccgatcttccgcagacggatgccgatgcaaacgcggacacgctcgacgatggcgaattcttcgatcaggccgcctcgtctgatgacgattcagcggaaaaagatgttgccgaagagtccaaagaagctgaagtaggtaatcagcaggccgattcccaaggcgatgccgatgaaggagtcgaacgccactgagcgcactttccatgggcttttgtcctgaagaatcaggcgaacaagcccggtgatgatggccgtcacggcaagtatgaccgtggcggccatcgtatatccgaaagcaaccagcagtgtgatgacggcgacgacgccgagtacgcaccattcaaaccatggcttgccctcatgtgcttcggatacatagggatggttgtgcatgttgcgattccttctgtcgaacggttacgtgaccacaatagcaggcgaatagcaaaggtgggattccgcttggacccgttgacgggtcaggcggaatcccacctttgtgcgttttggctgagctgctcccctcagagagtcccgatcagtggaagaagtggcgggtgccggtgaggtacatggtcacgccggccttcttggccgcttcgatgacctcctcatcgcggatggagccgccaggctgcacgatggccttgacgcccgcgtcgataagcacctgggcaccatcggcgaacgggaagaacgcatcggatgccgcgaccgcaccggtggcgcgatcggcaccatcggccagcgtgttggcgcgctcgacggccaaatggcaggagtccacgcggttgacttggcccatgccgatgccaaccgtggcctggtcgtgggccagcaggatggcgttggacttcacgcagcggattgcacgccatgcgaacacgaggtccttcagcgtgtcagcgtcggcggcctcgccggccacgagcttccaggcgtccggatcgtcgccgacggcgttgatcagatcagtgtcctgcacaagcaggccgccatcgatctggcggatggcctcgtggcccttcggcggctcggccaccttgaggatgcgcaggttcttcttcttggtctgcagcagttcgagcgcggccggctcatagtcgggggcgacgatgacttcggtgaaaatcgggcgcacgctttcggccatctcaagggtgaccttggagttgcaggcgatcacaccgccgtaggcgctcatcgggtcgcaggcgtgagccttcttgtgggcctcggccgcggtcgcgccgatggccagaccgcacggattgttgtgcttgactacggccacggcaatggcgggagccatatcccatacggtgcgccaggcggcgtccgcatccacgtagttgttgtagctcatcggcttgccgccgagctgctcggcgtgggcgaaaccggtctggttgagcgggtcgatgtagagggcggcctgctggtgggagttctcgccgtagcgcagggtgtgcgcacgatcccaggtgcgggtgaactgggccgggaacttggcggaatcgacttcagtgccctgatcgtccttgtccacctcgacggcgtccagagaggccggcttgggccagtgcttggcggtccactcgttgatggtggcgtcataggcggcggtgtgcgcgaaggccttggcggcaagccacttgcgctcgtccaaggagaagccggtgccgtcggccacgcgggaggcgaccagtgcataatcggccggatcggtgacgatggccacggtggcgtggttcttggccgcgccgcgcaccatggagggaccgccgatgtcgatcttctcgatggtatcggcctcgttggcgccggagcgcacggtgtcggcgaacgggtacaggttgacgaccaccaggtcgaacggcttgatgccgaactcctcgagctgcttggcgtgctcggggttggtcatatcagccagaatgccggcgtgaatgtacgggtgcagcgtcttgacgcggccgtcgaggcattcggggaatccggtgacatcggacacctcggttaccttgacgcccagttcggcaagcttcttggcggtcgaaccagtggaaacaacttcggtgccggccttcacgaacgcttccgcgagtacttcgatgccttccttatgaaagaccgagaccagtgctcgacgtatcggtcggttcgtgtttgtcatcctgttcctccttggattcttgtggttgtgacgctaggaaccgcgcctgacgaacggtggcggtcttcgaggtcgcggcggtggtgcgggaatccttgattctctcaaccaaccagactatcggaaaaacgagcgctgtgccaatcagcgcgagcagccacgccgcggtaagtcccagtgcggtcgaatgaccgacgactctggtggaggccatgacgtcgacgcctatgtgagcaagacgatgatcgccaagcgatccattggacagagcgaacagcaatgtggatgccagtgagatcagcatcgcgctcaggcagaatgccccggcggagtagatcagcgaaaccagtactgggccgcgggtggacgtattccgtatattcaacggtctgcaggcgaatccttgcggtaggaatacagccagcaggcccacgagcgcagcgatggcgagaggcgcgttcaaggcaacggtacgccatagttcgctgctgaccggttcgggcagaataccgaataccggaattgcaggaagctctttggattggccgagccataatgtgaaactggccaaatcaccgatggcgaatccgccgccgaagagccaggaaacagcccagagcatgacgttgggtagccagatcagcatggcgacggtggtgagaattcgtgaaccggtttccatcccggacaattcgaacaacgatacgacagcggcatggttgcgtaccgaccatacgatgacggtaatcaatccaattgccagatatatgctcagtatcgcgacggccaaggcgacgccgattttcaggcagtggcgtatgtccgccggcacctgcttgcgagtccagtccctgaatgctcgcattttggctgattccggtacggctgcgcataggaaaccgatcgagaatacgatggctgctttcagcaacaccagccactggtcatcgacaagacctaggtgcacggattgccggaatgcctcgttcaacccgagccaaacaatcaatccggcaacatacgcatgcggcccgtatgctttgattcgcatgatgagtgcattgatcagccatatcagcagtatggtcaacagcaatggcgtaatggtgagggtgaacgaatcggttctaaagcccgatccctcactcagaagcacaacggcctgtgtcagcgaggttgtgccgacggtgagattgtcgccgccctcttccatagagacgaccaataacatcagcgctgtatagcagcctaatgcaacggcatagatggccatggatgcgagggcgactatggctccccgcacccattggcgaatcacggctttcatcacgattggttggaaccgatcagtcgatgttggccttggcgagtacgtcacgcatgatttcggcggcctggcccggggtcttgcccacggggatgcccgccgcctcgagcgcgttcttcttgtcctgggcggtgcccttgcctccggagacgatggcgccggcgtggcccatctgcttgccttcgggggcggtgaaaccggcgatgtaggcgacaaccggcttggtcatgtgctccttggcccatgcggcggcgtcctgttcggcgaagccgccgatttcgccgatcatcatgacagccttggtgtcggggtcggcttcgaatgcctgcagggcttccagcagcgtcgtgccgacgatcgggtcgccgccggcgccgagacatgcggtgaagccgatatcggacaattcgcccatgagctggtaggtgagggtgccggatttggagaccagtccgagcgggccgcggccgacgatgccgtcggggatgatgcccagattgacgccggggttgccgagcgtgatgagaccagggcagttcggtccgatgatgcgcacgcccttcttgagcgccagttcgacgaagtatgcggaatcggccaccggaatgccttcagtgatgaccacgatgagttcgatgccggcttcgacggcttcgaccacggcggacttggcgaacttcggcggcacgaacaccacgctggccttggcgccggtggcttcacgtgcttcgccgcaggtggcgaacacggggatgttcgcgtcggcaccgttcttggcaccggggaaggtgacggatgtgccggccttgcgcgggttcacgccgccgacgatattggtgccggccttgagcatgcgagccgtatgggtcatgccctgatggccggtcatgccctggacgataacgggagcgccgtcttcgatgaacagcatcagcgaacctccttggactgggtcgcctcaccggcgagctgcgcggccttggctgccgcgccttccatggtctcggacacatggatattcgggttattggcggaggcgaggatatgcagaccctcggcggcggcgttgccatcgaagcgcacaacgatcggcttggaaccgccgagcttggcgaccgcttcgaggatgccgttggcgacttccacgcaggaggtgatgccgccatagacattgatgaacacggattcgacctgagggtcggacagtacgatctccaggctttcggccatgacggctgcggaggcgccgccgccgatgtccaggaagttggcgggcttgatgttggtgccctgttcctcgccagcgccggagacggcatccagggaactcatgacgagtcctgcaccgttgccgatcacaccgacctcgccgtgcaggtgcacgtagtgcaggccgtgttcgcgggcgcgctgttcgaaggggtcgggaacgatgggatccacgaaacgcgcccagccgtcatggcggaaggaggcgttgtcatccaaggagatcttggcgtccaaggcgctcagctgcttggtggattcgtcatccgggtcgccgatcttggcgagcggattgatttccacgagcgtggcgtcgttgtctttgaagcagcgccacatcttgagcagaatctgtgcggcctgatcgacgtccgcgtggtagaagccgatgctctgtgccatttcggtggcagcggccaggtcgaagtcaccgagcgcatcgatgtgcaggcgcttgacggcctccggatgttccttggcgatttcctcgacttcggtgccgccgttagcggtggccagcacgtcgaagtcgcgcgaggtgcggtccacggagatggacacgtagtattcgtgcaggatgttcttggcttcggctacaagcacgccggaaaccttgtgcccgtggatggtcatcggcaggatggactcggattcaagaatcgcctcgtcgcggttatgggcgatcttgacgccgccggcctgaccacgatgaccgatcttgacctgcgccttgattacgcagggatagccgattttgtccgccgcttcagcgacttcatgggagttctgggcaaagatggcgtccggggtgggaatgtcctgttcctcgagcagctgacgcgcctggtattcgtaaagatccatcgatccttccctgactatgtaattggtccggcatgtaactgtacacagtacatgccggaccttgaaaactgactgtacgttgggtgagacgaaatctcaggccggcatcgcgatcagcgagctgctgggcttgccgtcgagcttatccagaccgtcgaggccatcgagccgcatcacgaaactgaagcccaccacggtgccaccggccttttcgataaggtcggtggcggctttggcggtgccgcccgtggcgatgaggtcatcgacgatgagcactcgcttccctgcctgtacggcgtcggtttcgatttcgacactggccgtgccgtattcgaggtcataggattcaccgatggtttcaggcggcaacttgccggccttacgcacggcgatgaaacccttgcccaaatgggcggccatggccgggccgaacaggaacccgcgcgattcgagaccggcaatggagtcgaattcgctcggggacaccggcagggcctcttcaagtgctttgagcagaatcttcaagcccttggggtcggcgagcactggcatgaaatcacggaagatgatgccttccttgggaaaccccggtacggaacgcaccaaggacaccagatattcggcgtcctgttgccctaccttgctcaatgcgtcgatggtgatgtccgactgtgccatagtgctcgccccttttatgcctttgcgatgcgatacgcggatggtgctaccgaatcgaacagcttacttcgtcttggtttcgttgtcgtcaccggtctcgtcagcggtgtcttcctcggacacgacggacgcctcgatcggaacctgaccagcctcatcgttagccggagcctcggtgtcttcgtcgggcagcgggttgccgttctcgtcgacctcatcatcggacacataggccgggcgggtgtactcacgggcgatggcgttgaagccgaaacgcagcttggagccttcggagtcgatgacgatctcctcatactgctcgtcgacttcgacgaccttgccgatcacctggccgatggtgatgacctcggtgccgggctgcaggttgcgacggaagtcctgcttctcctgctgttgctgcttggccttcttggactgccaccacatcatgccgccgaacacgacgacgatcacgatgagcataatgtactgttgttccacgaaacaactccttcaaacgagcgacattgacgaaacgccgccaagtgtgcaaacaggagaaagtctagaagagcttgctgacatcatctttgggcgtaattcccaaatgctgccatgccttctcggtagccacgcggcctttgggcgtgcgaatcataaaaccttcgcgcacgagatacggctcgcacacggtttccacggtttccgattcctcgcccaccatggccgccagattgttcaggcccacgggtccaccgttgaagttgcgcacgatggcattgagcacggcgatgtccagccggtcgaggccttcggagtcgatctggtacagggccagcgcctccttgacgtcgtccggccgcaccacgatcaggtcgtggacgatggcccagtcgcgtacacggcgtagcaatcggttggcgatacgcggcgtgccgcgcgaacgcaacgcaagctcatgagcggaacccgcatcaaggtttacgcccagtacgttggccgaacgttcgatgagcttttccaactcctcatgcggatagaagtcgagatgtgcggtgaagccaaagcgtgcgcgcaacgggcttggcagcataccttcgcgcgtggtggcaccgatgacggtgaatcgcggcagggtcagcgggatggagcttgcgcccgggcctttgccgaccatcacatcgacgcggaagtcctccatcgcgatatacagcagctcttcggcggcgcgcggcagacgatggatctcgtcgatgaacagcacttcgccgacgtcgagggagctcagaatcgaagcaagatcaccggcatgttgaaccgcagggccggaagtcacgcgaatcggcacttcaagctcattggcaacgatcatggccaacgtggttttgcccaagccaggagggccggcaagcagaatatggtccggtggcacatcgcgtttgcgggccgcgtccaggaacagttgcagctgggccttgagccgtggctgtccgataaagccttcgagaacatgggggcgcagctcctcgtcgctgaccggctcgttgccgatcggctgggaggagaccatgcgcaacgactcttcgttggcaccggtgttggaggctccgtaatccgttgtctcgctcatcagcggcccctatccatcagcgccaaagccagacgtagcacacgcggcacatcgtcggtggcaagcggcgtgggaatatcgttttcggcgcaagcctcggcaacggcctgttgggcgtcctgctgacgccagccaagtgaaatcagtccttcgacaacctgttccgtaccggtatccaccggagacttggatattgccgcctgagcggaagcaccctcgatctgactcaaatcaatagagcccttaagctcgaggatgattttctgtgcgcccttcttgcccagccccggagccttggccagcgcggtggcgtcgttgtcggcgatggcgtgggccagctgactcggcgtcagtgtggagagtaacgattgggccactttaggtccaatgccggagaccttgatgagttgcagaaaggttttcttggcgtcccgatccaggaatccatgcagggtaatggcatcctgagagaggttcatataggtgaagacgcgggtgtcttgcccggcgtgcagacggctcaggtcggtggcggacatgcgcacttcgtagcccactcccccaacatcaatcaatgcggtatcggtttcgaccgattcaacccgcccggtcagcatgccgatcatacaggtactccttcagggctccaggattcaagactcgaacaactgttcgaaagtatactacatgcctcggtcgtggttgatgcggcggcgcgtggatttctgtgcggcctcagcccactggcgttgcgcggcggtcagatgttgttcgcgttcgccgccctgcaatgcgcctgccgggcgcagcgcatggcaaatggccaaagccaaggcatcggcggcatcggcgggagtcggcattttggtgaggttcaaaatacgtgtcaccatacgctccacctgaatcttctgcgcctgcccgttaccggtgatagccagcttggcttcggtaggcgtatgcaacgccacgggaatattgcgttgcgcggcggcgagcatggcgaggccggcggcctgtgcggtaccgagtacggtgttgcggttggattgtgcgaacactcgttcgatggatacggcatcgggtgcgaagcgatccattttctcggacaggccgttgtagatggccagtagacgcagatcctgggtgatatccggtgaggaccgcaccacgtccacgtgaataaacgaaagccggcggtgctcgccggcttcgatcacgccgaccccgcaacgtgtgagcccggggtcgacgccaaggataatcacgaggattactcctcgtcgagctgggccatcacctcgtcggaagcggtccagttggagtagatgttctgcacatcgtcgaggtcatcgaggttgtcgatgagcttggacaccttgcgggcatcgtcgaggctcaactcgacctcgttcttcggctgcatgacctggtcggcggaatcgtagtcgaagccggcgtcctgcagagccttgcgcacggtgaacaggtcggacggaccggtcacaacggtgaacacctcaccgtcatcggtaacgtcctcggcaccggcttcggcggcggtttcgaacagcttgtcgaagtccacgccctcggacggcaccacgatctggcccttgcgctcgaagttgaaggacacggagccggaggtggccagggagccgttgcccttggtcagggtggaacggacttcggcggccgcacggttgcggttgtcggtaaggcattcgatgatgaggccaacgccggcaggagcgtagccctcgtagacgatgtcttcgtagttggcggcgccgtcttcagcaccggcaccacgcttgacggcacgagcgatgttgtcggccggcatggaggccttcttggccttgtagatggcatcgtacagggacgggttgccgtccgggtcgccaccgccgaggcgggcggcgatttcgatgttcttgatgagcttggcgaagagcttgccgcgcttggcgtcgatggcggccttcttgtgcttggtggtcgcccacttggaatgacctgacataatgctcctagcaattattgaaacggatgatgtcaaacgaaacgattgtaggccgttaatcagacatacccgtgatgtttccgatgattgtcttgttatgcgtaccgataagaccggtcacgcggggtgccgcacctgtgttaggcaagcggcagatgatactgcggagccagctgttcgaatgcctgggcataggcttctcgctggtcggacagcagaataggcatggtgcgtgtctgggcgacgatgggcatgaagttcgcgtcaccattccagcgaggcactacatgctgatggaggtgagcggcgactcctgcgcctgctacttcgccctgattaatgccgatattgtaaccgtgcggacgggagacggtttccatcaccttcatggcgagggtggtggccttctcgaattcgaacagttcggcatcgtcgagttcggtgatgaatccgacgtgacggtacgggcagatcatgagatgcccgacattgtatgggtagaggttcatgatggcgaacacgtgcgtgccacgccaggcgatgaggccgtcttcgtcggatttcttgggtccggcgcagaacgggcattccttcgtcttgggcttggttgggcgatcctcgctgttgcgcagcacataggtcatgcgctgcggagtccacagtcgttcgaccgtgtcctcctgaggcggaaagtccgccggattatcgacacgcacgtcagtcattttcgcgccctttcttggctcccctcagagaggggagccagtaccattcacatcactcagccacagcggcgttgaagtcgtcggcggagttcacctggacgcgcttcttgatgacggtgaggatctgctcgcgggccttgtccaccggaacgccgttgagctggctgccgtcacggaagcggaagctgaccgcgttgttgttcatgtcttcctcaccgacgatgaggatgaacggcaccttggacttggaggcgttgcgaatcttcttgccgaagcgatcgtcggagtagtcgatctcgcaacggaccatctcgtcctcaagggacttgacgaaaccggccagatgcggggcgaactcgtcggcaaccggcacgccgagcacctgcacgggggccagccacgccgggaaggcgcctgcgtagtgctcgagcagcacggcgaagaagcgttcgatggagccgaacagggcgcggtgaatcatcaccggacgctggtgggtaccgtccttcgcgatgtactcgagctggaaacgctcgggcaggttgaagtcgagctggatggtcgagacctgccaggtgcggccgatggcgtcgcgggcctgcacggagatcttcgggccgtagaaggcggcgccgcacggatcgtcgacgagctcgaggttggattccttggcgacctcggcgagcgtgttggtggcctcctcccagatctcgtcggagccgacgtacttgttcgggtccttggtggacagctcgaggtagaagtcggtcaggccaaagtccttgagcaggttcagcacgaaggtcagcaggctggtgagctcgtctttcatctgctcgcgggtgcagtagatgtgggagtcgtcctgggtgaggccgcgcacgcgggtcaggccgtggacctcgccggacttctcgtagcggtacacggtgccgaactcgaagaggcgcagcggcagctcgcggtaggagcgctgacgggacttgaagatcaggttgtgcatcgggcagttcatcggcttgaggtagtagtcggcgcccggcttggtgatgttgccgtccgcgtccttctcctcgtcgaggtgcatgggcgggtacatgccgtccttgtaccagtgcaggtggccggaggtctcgtacaggccgcccttggtgatgtgcggggtctgcacgaagctgtagtggtgcttgcggtgcatctcacgggagtagtcctccatcgcgttgatcacggcggcgcccttcgggtggaacacggccaggccggggccaatttcatccgggaaggagaacaggtccatctcggcgccgagcttgcggtgatcgcgcttggcggcctcctcgagacgggtctggtaggccttgaggtcttccttggtggcccacgcggtgccgtagatgcgctgcatggtcgggttcttctcggaaccacgccagtaggcggcggcggaacgctcgatcttgaaggccttgatgtagcgggtgttcggcaggtgcggaccgcggcacaggtccttccaaaccacattgccatcacggtctacgttgtcgtagaagctgagctccttttcggagatctcggtggcggcggccgggtcgaggtgtgcttccttgtcttcgatcagttcgatcttaaagggctggtcggcctcttccttcagagcctcttcctcagtcacggaacggcggcggaaggactgggaggacttgatgatgcgctgcatgcgcttctcgatgtccttgaggtcgtccggggtgaagggctggtcgacctggaagtcgtagtagaagccgtccttgatgacggggccgacgccgagcttggcgttcgggtagacttcctgcacggcctgggccatgacgtgggtggccgagtgacgcatgattgcgaggccgtcttcggagtcgagggcgatggggtcgacggtatcgccatcgttcagcggcgtgtacaggtcacggttctcgccgttgatcttgaccgcgatgatgttcttgtcttccgcgaacagttctacgccggtggtggttgcttccacctccttcgcttcgccgttgacggttatggagatggtagcttgcgccatgatttgtcctttgctatcggggcccacggtactaatgtgcaggcctggactggttaatcaacgtaggacacgataggttgggcgtgcgacaaataccaccagcatctgaaccaatacgaaaaaacctcgccgaagcgaggtttcgttgtggagcggacaacgggactcgaacccgcggtctcaaccttggcaaggttgcgctttaccaactaagctatgtccgcaaaggaatccgccgtgagaagcggaatccagtgggcgatgtaggaatcgaacctacgaccccttcggtgtgaacgaagtgcgctagccgctgcgccaatcgcccgaatactcggtttttcagttatatccagtcgaattgcttcgactttcgtgggcgatacaagattcgaacttgtgaccccttccgtgtcagggaagtgcgctaccactgcgccaaccgcccgggtcatatttcatcccattgaattgcttcgctggtctgagaggtgggtacgagagtcgaactcgtctatacggctttgcaggccgctgcctaaccgcttggctaacccaccgtaaggtctgtcaactcacggacctagagcggacaacgggactcgaacccgcggtctcaaccttggcaaggttgcgctttaccaactaagctatgtccgcgtgtgtttccttggcgaggtctccctgccgaagcacgagtgtttactatactcacatgcgtgtagttcgtccagctgcggcgtgtcgcctgtaattgcatactctcgcttatggctaaagcgtgcgcttcgggcaatgaattccagttactctaaaggtatgagtgaagcagcgaaggacaccggcgcagtattgatcgccgcattcgagggatggaatgatgcctgtcaggcggcgacgaacgcggtgcgccatctggtcaagcgatatgagtcccgcgagattcgtcatattagatgtgatgatttctatgactatcaggttgcccgtcctatgctgtgccatgtttcgggacgcaccaatcttatctggccgcagaccacgttctacgacatcacgttggacgcaggcaagcatatctatgcgcagatcgcccccgaaccgaactatcggtggaaggaatactgtagccagagtctggccattgccgatgagctggatatcaatcggatcattacgttaggttcgatgttctccgattgcccgcatacccgtccgttgcccatcgccgtcagcgacggagactgtcaatgcgaaggagaccggtcgtataacggcccggtaggcattcctaccgttttggatgtggccgccgcgcagcaaggttttgctcattcctcgatgtgggtgtccatcccccaatatttgggcagcgacgaatgttctgccggcactatgcgattgctggatgcgttgggcaagcatatcggcttcaccttcgatacggcagagctgaagcagaaagccgaacagtggaaggcgcaagcctcgatactggttcgttgtaatgaccagcttcacgattacgtggagcatttggagcacgactacgacttgcagcagaaagccgaggcggaggcttccttgggagcgccccaggccgaacaactggtcaaagaagcagaagcgtttctgcgccagatgggcaattagccctatatacacaatatcccgctgacgggagctggctcgcgtagcgagactgagggtggttctgctggcatattccagtgaccaccctcagtcagcttcgctgacagctcccgccggcgggagcaccattaatattgagtcgcctatcgacccgtcttatgccgcagccaccacggagggatcgatggccggcagcacgcccacaatcagcagcaaggcgacgaccacagccaaaccgatgcggtagatggcgaaggccttataggagaagttcgatacgaacttcaggaatccgatgatcacgatgtagccgagtacgaagctgatgaccatggctacgagggtcggcccccagccggggaacatcgcatcggttttgtagttcttcacggccttgatggcttcgagcaaacctgagccgaacaccgcggggatggccatcaggaagctcagacgcacagcggcctcacgcgtgtagcccagtgcgcgaccgacggtgatggtgccgccggagcgggacacaccaggaatcagcgccatggactggcccaaaccgaagaggaatgcatcacgatacgtcatatcattcatggttttgttctggcgagccttggcatccaccatccacagcagaatgccgaataccaacagcacggttaccgtaatccacaggttgcgcaacgaggtttcgatgacgttctgcagagtgaagccgaggataataatcggaatcgagccgacgataatgttccagccgagtgtggcgtaattgtcgccgcggcccatgcgggccttccaatccttgccgttcttgccgaacaggcagctgaaccagtgagtaaggatattgatgatgtcgtgacggaaatacagaatcaccgcaagttcggtgccgatttggatgatggcggtaaacgccgcaccgggatcagagcccagcatcaaatcgccgaaaatacggatatgcgcgctggaggacaccgggagatattcggtcagcgcctgaacgatgccgagaatgatcgcttggaaaaaattcataacccctcgtgatttctaagtatttgatgtgttatgacgatgaacaccctacccaagggggtgtagaacaacactaagaatcggtaacatccacggcttctacaatgaaagtggatatagtacgtaagcgacgaagggagcattatggccacgtatcgcaaaagcagggcattcgcaccggaaggattcttcgaatgcgagggtcgaggactcgaatggttgggagcggctcatgcgcaaggcggcccgcgcgtggtgcaggtatacggctggggcaaggattatctggatatcgaacgtgtgggtagcgcgtcccccacgcctcaggcggcacgagcttttggcgcggctctggcccgtatgcatgatgcgggtgccaagtatttcgggtctgcgcctgacggatataacggcacatgctatttcggaccattgcaggacccggtgaaaatggataccggcgagtggaccgacccgatcagctatttcgctgatggacgtctgcgcccgatggtcaaccttggtgtgaaacgtggcgagctggataagcgcgatgtcgagttgactgagcgtgtgattgaagcgctgccggatctgatgggccgcgccgcggccgacaagccggcgcgcatccacggtgatctgtggagcggcaatgtgatgtggaccgccgattccgggcagtccgaggccgtgctcatcgacccggcggcacatggcggtcatcgcgaggaggatctggctatgctgcacctgttcggtatgagctatctgagcgaaatcaccgagggctaccagtccgtacatccattgaaggccggatggcaggagcgcatcacgctctggcagctctaccccatcgccggccattgcgtcttcttcggcggcggctacgtcaacgaataccgctccatgtgccgctccctgctgaagtaacagacttggctcccctcagagggggagccaagaacgcatccgctctcagctcagtgcgtccttcaacttgctgaagaaacctttcttttgaccggcctgtggacgggatgcctgggagacgtgcgtggcgcctgaatcgtgcgaggcggcgaactgttcgatgaggccacgctcggtttcgttgagcttggtggggataagcacattgacgtgggcgatgaggttgccgcgctcgtccttgttgcggatgttcgtgacgcccagtcccttaagcgtcaccgtgtcctcagtctggcagccggccgggatggacacggtcttctcaccatcgaacgtatcaatggacagatcgtggccaagcacggcccagctcatcggcacctgaatccagcagtgcaggtcgtcgccatcgcgggtgaactgcttatccgccttgatgcggatgtcgatgtacaggtcgccggcagcgccgccgccctcacccacttcgccctggttggccaaccgcagacgcgcgttgtcgttgatgccggcgggcacggtaacgcccacggtacgcgtggtgcgcacacggccgtggcccatgcagctggggcacgggttctggatgatggtaccgtggccctcgcaacgttcacagggggcggaggtcatcatctggccgagcatggtgcgcacgaccttctgcatgaatccctgtccgtggcagtcggggcaggtgaccggctgtgcgccgccctgggcaccggagccaccgcactcctggcacagggagaacgtattgatcttgacatgcgcggtgccgccgaacaccgccgtcttcaaatcgatggacgccgaggccaaggcatcgcggccgggctgggtacgcggcaccgggccctgtgagccaccgccgaacgcggaaccgaagaacgtggagaacacgtcgctcatatcgccgaagcccgccccggagaagccgccggcactggcgttcgggttgttcgggtcgactcccgaatcatacatacggcgtttgtccggattggacagcacatcgtaggcgttgttcacttccttgaacttgtcctcgaactcagggcccgcgatgtcggggtggtacttacggctgagcttgcggtatgccttcttgatctcgtcgtcactggcgccgcgttccacacccagcgtctcgtaataatctgccacttgattgatcctttgtgttcgtttggtctgcgggtcattgtgccacagacggcggtcagtcttgagtccggccctcggagaggaaggcggtcaaatatctggctacggccctgacggcggccatagtggccgcgtagtccatgtgggtcggccctatggagccaacgaaggcgatgggttccgtgtcgttcgtctggctctccgtctcggattcggtttcgggttcgcctacgggatcgttccccgccggttcgcccgccgctccgctgcgcccatagccactgctgaccacggaagcatgcagtagtccgggggtgtgcatttcggagccgatggccacgcccacgccggatgcattcgtctcctcgctcaggttgctcatgagcttcatcagcacgacctgttcttccagcgcgtcgaagagcggggccagatcggccagggaccgggagtgggccaggtgcgaggtgccggacatgtacagttcgttcgcgcgttcgtccaatgccatcgattcgaaggcgtcggccagcgcgtcggccacgccacgcaccgactcgtagccggcgctggcggcgatggatcgcacggtctccgcggatttcgatagggacagcccgtcgcattgctcgttgacggtgttggagagccggttgatctcgtccacggcgggcatggatgcgatggtcaggccgtgctgggccacgcggcctgtgtcggtaatcaccacggcgagcaacgtggtcatggcaacgggcaccatctccacgtgccgcaatgtggccttggccagcgatggcgaggcgactacggccacttgaccggtgatttcggacagcagtcgtgccgaacgttgcagcgcgtccttgagactcaccgatccggacaggaagctgttgatgccgcggcgttgcgcctcgctgagcggcaccacggtagcaagtcggtccacaaagtatcgatagcccttttcggtgggcacgcgaccggccgaagtgtgcggctgaatcagatagccttcgtcctccagagcggccatatcgttacggatggtggccgaactgacgccgagatcatggtcgcgcgtcagcgaagtggagcccacaggctcctgagaacggatgtaatcctccaccacggcgcgcagcaccagcatgcgtcttgattgcgtcatgcgcgcctcctcatatatgcatacatattcatatcagtcacggttcactcagggcgtaccccgacggtcggttcgccacgccgcgacacgcgggaacccagaaatattgcctctttcttggctccgccacgtgcaggtggcgcacttcaccttagaacattgtattagcactccttaggcttgagtgctaatgcgttcgtttgcagcgtagcaatgttcactgtgaacgctaacagaacacaaactaccaaaacacgccaaaattgcaccacaacgtcgcaaaccgacgctagcatggtaatcgcaatgtgagggcgtcaagcgcccggcacaagccggatacgcggcccgaccaattggaaggaaagtaatccatgaccgaattcaaggagaccgagctcgacgagcgcgccatcaagatggcgaaggtcctttcggctgacgcggttgagaaggcaggctccggccaccccggctcccccatctccctggcgcccgtcgcctacacgctgtaccagcacttcatcaagcacgatccgaatgatcccaactgggaaggccgagatcgcttcatcctttccggtggccacgcctccctcacccagtacgtccagctgtacttctccggctacggcgtgaccctggacgaccttaagaacttccgtggcggcgctgccacccgcaccccgggccacccggagtacggcctgaccccgggcatcgaaatgaccaccggccctctgggccagggcttcgcctccgccatcggctttgcctacggcgagcgtttccagcgcggtctgcttgacccggagaccccgaaggaagattccccgttctaccacaagatctgggccatctgcggtgaaggcgacatcgaggagggcatctccggcgaggccgcttccctggccgccaaccagaagctcggcaacctgaccgtgatcttcgacgccaaccgcatccagatcgaaggcgacaccaacctggtgctggccgaggacgtgctcaagcgcttccaggcctacggctggtacaccgacgagttcagcttcatccagcccgacggctcctacaaggaggacatcgagggcttggctgacgtcatcgccaaggccgagaaggccgctccggaccagccgaagctcatcaaggttcactccctgatcgcttggccgaccccgggcaagaccaacgacccgtcctcccacggttccaagctgggtaccgaggctgttgccggcctcaaggaagccctcggctacgatccggaagagaacttccacgtcgacgaagaggctctggctcacgctcgcaaggtcgccgatcgcggcctggaggcccacaaggcctgggacgagaagttcgacgcttggcgcaaggccaacccggacaaggctgccctgtacgaccgtctgaaggccggcgaactgccggaaggcttcgacaaggcccttgacgaccttgaggccaccttcgaagtcggcaagggtgtcgccactcgtggcgcctccggctccgtgctcaacgccatcgccgccgtcatgccggaactctggggcggctccgccgacctcggtggctccaacaagaccgatctcaagggcgctgccaccttcgccccggccgagtgcgccaccaagcagtggccgaactgcaacgagttcggtcgccagctgcacttcggcgtgcgcgagttcaccatgggctgcatcaccaacggcatcctgctgggctcccacacccgtccgttcggcggcaccttcttcatgttctccgactacgagcgttccgccgttcgtctggccgccctcatgcagatcccgaacctgtacatctggtcccacgactccgtcgccgtcggcgaggatggcccgacccaccagccggttgagcaccttgcttccttccgcgcgattcctcagcttgaggtcattcgcccggccgacgccttcgagaccgccgaggcttaccgttacttcttcgagaagaagaacaccctgcctggtgccatggttctgacccgtcagggtgtcccggttcttgccgagaccgccgccaaggccaaggacggtgtcaagaagggcgcttacgttctggtcgacaccgagggcactccggacgtcatcctcatggcttccggttccgaggtccagtgggctgtggctgccgccaagaccctggccggcgagggcgtcaaggctcgcgtcgtgtccatgccgtccatggaatggttcgaggagcaggacgccgagtacaaggaggccgtgcttccggccgctgtcaaggctcgtgtctccgtcgaggccggcgttgccatgccgtggtacaagtacctcggctcctacggcaagcccgtctccatcgagcagttcggcctgcagggcgacggcgctcagaacatgatcgacctcggcatcaccgccgagcacgtggtggaagccgccaaggcctccatcgccgaagtcgaagccgccaagtgagtcccctagcctccctctgacgagggaggcttgtactcaagactccacctgatcggccctctcgttagagggggtctacttaaagatttgttccaatacggaatataaggagaaaaataaatgactgaagcaactcagcgtacgtctgacaacggcgtttccatctggctggacgacctgtcccgctcccgcatcgagtccggctccctgcaggacctcatcgccaacaagaacgtcgtcggtgtgaccaccaacccgtccatcttccagaaggccctgagccaggtcggcccgtacgacgctcagctcaaggagctcggcaaggttgacgttgagaccgctgtccgcgagctcaccaccaccgacgtgcgcaacgccaccgacatcttccgcgagatcgctgaggctaccgacttcgtcgacggccgcgtctccatcgaggtcgacccgcgtctggcccacgacaccgagaacaccgccaagcaggctgtggaactctgggagaaggtcaaccgcccgaacgccatgatcaagattccggcaaccctcgaaggcctgccggccatcaccgccaccctggccaagggtatctccgtcaacgtcaccctgatcttctcgctcgagcgctacgagcaggtcatcgacgcttacatcgagggcatcgctcaggctgccgccaacggccacgacctgaagcacatcggctccgtcgcttccttcttcgtgtcccgcgtggacagcgctgtcgacaagctgctggaagccaacggctccgacgaggccaaggctctggagggcaaggccgctgtggccaacgctcgcctggcttacgaactcttcgagaagaagttcgccgaggatccgcgttgggccgacctggctgccaagggcgccaaggttcagcgtccgctgtgggcttccaccggcaccaagaacgccgcctactccgactgcaagtacgttgacgagctcgttgccaagcacatcgtcaacaccatgccggagaagaccctgaacgctctggccgaccacggcaacggcgctccgtccatcgagggcacctacgaagagtcccacgccatcatcaacaagctggctgagctcggcatcaacctcaaggacgtcaccgacaagctggaggccgacggtgtcgctgccttcatcaagtcctgggattccgtgctgtctgacgtccagtccggcatcgaccgcgtgaacgcctgagatttgacgactgatgcgtgtttagcgcactagttgattagctcacagaagccccgaccccaacggtcggggcttctttcgtttgttgctacagtggtacgagcatatgagagaaaggccgaatcgtaatgaacaaacttgtcgcacgccagcggttggtgatgaccttcaccttcttttcgatgttcttcggagcgggcaatctgatttttccgccgttcgtcggcgcgcaggccggttccgcgaccataccggcggccatcggtttcatcgtctccgcagtcggcctgccgattctcggcgtgctggcggtcaccttcgccggcggtttcgacaaactcgccagccgggtctcccccaaattcgccttgttcctcggcgtggcgatcatgctcaccatcggcccgtgctttgcgattccacgtacggcgaccacctcattcgaaatgatggtggctcctttcgtaccgtcctcctatggctggctggcccaactcatctactcgctcgtgttcttcacactggcgttcctgttcgcccagcatcccgagaaactctccaaagtgctcggccgattcatggggccgttgctgctggtgctcattgctgtcctgttcatcgcctgcctgatccacggcatcggcatcccggccaacccgatgggcgactactccacaaaccagatcgcacgcggcttcctcgacggctaccagaccatggacctgctcgccgcgctctacttcggcatcgtgatctccgcgaatatccgcgcccaacaagtcgatgacgaatcgcaagtgcagaaggagaccgcgtatgccgggctcggcaccggcgtactgctgatcgtgatctacggcgcgctaagctacgtgggcgtggtgtccggagccatcgccaccatcgaccccaccaaagacacgggcgcgaccgtgctcaccaacctcacctcatccctgttcggcacgttcggtaccgcgttccttggcatcgtgttcgtcatcgcctgcctcaacgtatgcaccggactgatcggcacctgcgccacctacttccatactcggttccggaccgtcgccggccgaacgttgagctaccgcacctggcaggtcatcttcaccgtgttcagtttcatcgtgtccaatgccgggctaagcgcgatcatcaaggtttccgtgccggtgttgtccgcactgtatccgatcgccatcgtgctggtactgctgacgctgacccacaagtcgctcggcgcgcgattcccgcgcgtctacttctggaccgtgctgctggtgggcatcgcatccttcgccacctgcatctccagtttggtcgccgtcttcggcggttccatcggctggctggacgcggcgctggctatgctgcctttgcagcaataccagctcggctgggtggtcccggctatcctcggtgttgccattggtatcgccgatgctccgcgacggtagttcttcccggtctgtgccggagtctggcggtcggtcggtgatggcggctgccgcagtatccctcctataaagcggcatacagaattcctgtatgccgctggtctccgcccatctgccatagttatactagcatcatcgacgacggcgataacggcataaggtggggtgagtcatggacaccagtgatagacagatagcggaaaccggccggaatcgcgagcttgggctgattccggccatggtgatggcggttgttgcgacgctcagtggtgccggtgtatcgttcgcgccattatatgagcgcatttggggcggcatgatgttgcatccgaattgtccggcgattggcagaatgacctactatctctcgggccaagcaactgacgattatggagcctgcgtcacctcaccactgtggtttatgacggtgactgcgctgagtgttgtcgcgattctctgtctgactgttgcgggagtacagggcttttcgcgccatcggctctgttcggtgtttagtgttcttattgcggcagtggctgttgcgatcatattggtgttgagtgcgaataccaagattgtaacgttgtgggcgatgtatgcggtgacgtggctggtgcacgccatagtcacctcatatctgagcaacggttggatacgaatcgcgcgactgttgttcgtatggcagattggcgtgatgccggtattcgtcaccgaatattcagtatccgacgaggtcaacttcagcggcggcgcaaccatcgcttgcggacttggacttgcggcatatgcgctggtgcaatgcgcctctcttaccatcgactcgcaaaacaacagtaatcgaatcacgccagaacgcagtggtatacgggctacctccttgcacgacctgttccacaccatcagcatcaacgcatccgccatacgcaattgctctgttcccgttgccctgttctggtcaggtatcacgttctttacctacagctacaacactggtagacacaccgatttctgcccagcgctatcggcaactgacaatgcaggtcttgtcgcttattgcatcggccatgaagctttgggactgctgaccgtcgtgttgtgcgtgctgccattgttctccctgctttcggcgattacggccatcacgttggctgcacgcaacgcaaataacggcggtaacgctgccaatgccgatggctctcgaaattcagccgccgtgtgctatctgctcctggcaaccgcactgtccgccacggccttcgtcatcgccttcaccttggcatagcgcggaccaccatgccgcggttcgcgcgatcgctgggatacagcgcttcctgcgcacgacgcgacaccaccggcataagatctccttcatatcacgaaacaatcgagcgtgttcgtttgcgccaaggatcagctctgccagtagtagctgaagaagtcggagatctcccccatggtttcgcgcagcatgcccatgcgcggcaggtacaccacgcggaagtggtcggggcgatgccagttgaacgcgccgccgtggctgatgaggatgtgcttgtcatgcagcaggtcgagcgcgaactgctcgtccgagtggatgttgaagcgtttgacgtcgatcttcgggaagatgtagaacgcggccttcggcttgacggcggtgatgccgggaatctggttgagcatgtcgtagacgaggtcgcgctggtcgtgcacgcggccgcccggcacgatgtagtcgttgacgctctggtggccgccaagcgcggtctgcaccacggactgggcgggcacgttcgaacacatgcgcatgttggcgagcatgttgaggccctcgatgtagtccttggcaatgcgcttgttgccggacaggatcatccagccgatgcggtagccggcgatcatgtgcgatttcgacaggccggagaaggtcacgcagaacaggtccggggccatcgaggcgatggagatgtgctgcaggccgtccatgacgaggcgatcgtagatttcgtcggagaagatgatgagctggtgttcgcgcgcgatgtcgacgatctgctggagcacttcctttgggtaaagtgcgccggtggggttgttcgggttgatgatgacaatcgccttggtgttgctggtgatcttggagcggatgtcgtcgatgtccggataccattcggactgttcgtcgcacaggtagtgcacggcggtgccgccggccaggttcacgcaggcggtccacagcgggtagtccggggagggcacgagcacttcgtcgccggtgtcgagcagcgcggacatggacaggttgatgagctcgctgacgccgttgccggtgtagatgtcgtcgatggtgacgttcgggatgttcttcagctgcgcgtactgcatgatggccttgcgcgcggagaacaggcccttggacggcgagtagccttcggtgtcggtgagctggtgggccatgtcgtagacgacttcgtccggcgtgcggaagccgaagggtgccgggttgccgatgttcaatttcaggatgtgggtgccgttggcctccatgcgcatcgcctcgtcggcgaccgggccgcgcacgtcgtagagcacgttgtcgagcttgtgcgatttgccgaaggtgcggcggcggcccacgggaatctcgctgtccgtctggggcttggcggcacccatggcaagcggtgtggcggcgtgttcgccgtccgtgacgctgttggatgcgtccgagttcaattgcgtggtggattcctcgccgcgcagccaattcgtgtcgacgtccagttcgctggccaggaattcgagcacgtcctcgcggggcatggtcttgccggccacatattggctgatgtggctcttgcccatctttacgccacgatgttcggcggcgtgcaccaaatcgacctgcttcaatcccctgctgttcatcgcattgcgcagacgttccgcaaacaccgatacgctcatatccttatgcctccaaccgggagttcaatttatcttttgaacaacggttcaaagcatacccccggttcaacacaagttcaattttggcgtgttctcgagtctcgaccggttcaacccaactgcgcttcaatccattgggcgacgccgtcctcgttgttggacgggcagatctcgtcggcgacggacaacaccttggggttcgcgttggccacggccacgccccggccggattcgctcatcatgttgatatcgatgaggtcgtcgccgaaggcggctgtctgttcaagcggcacgtccagtcgctcgcacagcaggtgcagcgcgtgctccttgttggcctgcgggttcatgagcatccacatcacgccttcgctgatggagatgtcgaagtccggcggaatcagcgcacgcagctcgttccactgttcaggttcggggaagatggtgatcttgtccgccacgccttcgggcacgtcgtggaagttcgtgtattggaaggcctgagttttccaatacacgcgcacatcgaagttggtgtagcgcacgtcgttcatcacgatgccgagcttcaggccgggcatgcgatcgagcaggaacagacagacttcgcaggcacgccgtgaggagaagccaatcttgatcaaatggttctcatcggccggcgtggcacctgaggtgagcaggtcgaagtcggagtgggccgggtcgaaatcgatgagggcgccgttcagatagattacggcgtccaccggcagtttttcggcgaactggagaccggtactcaccggccgcgcggtggcgatggcgaattgcattccggcatcgtgcgcgcggttgatggtgtcgatgctgcgctgggtaatgaaccggtcctcgaatacctcggcgtcgtgcagcaacgtgccgtcgaggtcggcgaccagcagtcggggttgtttcggcgtgatggcgtcgagaatcacagcagcccctcacagtgttcacgcacgagttcggcggaatggtgcagtttggcccgctcgtcctcgctcagatcgagttcgacgatctcgttggcaccattggcgcgcagttcagtggggacgccgaggaacacgtcatgttcgccgtattcgccgtccagcagggtggagacgggcacgatgcggcgttcgtcccacaggatggtctgtacgatgccggccacggtggaggcgatgccgaagttggtgccgcccttggccgcgacgatctcattgccacgggtgcgggtcttctcttcgatttcggtggtggacacggaggcgaaacggtcttggttgtcggccaggaagcgggcgaatggcttgccgccgagcgagacggtggaccatgcggtgaactgggagtcgccgtgctcgcccatcacgaagccgcccacgttgcgcgggtcaaggccggtctcttcgccgatgatggtcttgagacgcgaggtgtcgagcgcggtgccggtaccgagcacctgggtgcgaggcagaccggaacgtttccaggcataccaagccatcacgtcgaccgggttggagaccatgacgatcacgccgtcaaaaccggaggccatgacgttgtcgaccacttcgcccacaagacccacggtgaagccgagttcggccatgcggttggagttggccggcggcttgcggcccacggtgatgacgacgatgtccgcatccttgcagtcggcgtagtcgccggcgcgcaccttgacgtggcggtcctggaattcgctgccatcatcgaggtcgcgggcctcccccagggccttggcggcggaacagtcgatgagcacaagctcattgcacaggccgtgcgtgacgatgccgaaggcggcggtggcaccgacccggccggtgccgacgataacgactttgttgcggttcatagtgaccatggtgatgtcctttcgtaatactcgatagaacgcatacgacccatgaccgacggtaacggtcatgggtcgcgagcgacaagtctatatggcgtgcaagccgatcagccgaggttgaacttggtcatcatgtcgaggccgatgatcaaggctacccacaccagagcgatgataacggtccaacggttcaggttcttttcggcgacaccggaagtaccggcgttctgggtcagaccgccgccgaacatgtcggacaaaccgccgcccttgcccttgtgcataaggatgagcagggtcagcacgaagctgagcagcacgacgatgacttgcagcgtgatcttaagagcggtcacagggtacctccggattgattggactgttgaccagcatagcgcacacacgggaaaaccgtggtattagttccgtgatttcgtggatttcagtgccagtcgagcgattttggcgagttcctcaacgtccagggccgcccctccgatcaggaagccgtcaacgtcgggctgggaaatgagttccgccgcatttttcgaggtgaccgatccgccgtacaggatacgtacgctatcggataccttcgtgccaaaagtggtcttcaaatcgttgcggatggcgtttgcggcatcctgggcggattgcggagtggccaccatgccggtgccaatggcccagacaggttcgtaggccacgatgagtttggcggcttgttcttcgttgagatcgcgggtgacgtctcgtccctggcccacggcgaaatcgagttcaatgccttgacgtcgttcctcgaagctttcgccgacgcacaaaatcggctgcatgccggcggcgagcacggcacgtacctgatcgacgatattggcgtcatcttcaggatggtatttgcggcgttcggagtggccgacgatgacgtatgagcagccaagatgggcgatcatgtccgcggacacatcgccggtgaaggcaccttgggtggtcacggaaacggattgtgcgccgtaggcgacatggagcttgtcggcttcgaccagcacctgcacgctgcgcaatgacgtgaacgaggggaaaagcgcgacttcgcagcgtttaaagtcgaagtgagcgtcacgcaacagccataccagcttctgcacgaagtaagtggcttcaagatggtcgaaattcatcttccagttgccggccaccaacggaatgcgtttggacgccatatgtttcccttctaaaaaaaaacgtagctcccctcaaggaggggagctagaaaatggattactcaagcaccttcaggccagggagctccttgccttcgaggaactcgagggaagcgccaccaccggtggagatgtgggagaagccgtcctccgggaagccgaggttgcgcacggcggaggcggagtcgccgccaccgacgatggtgaacgcaccggctgcggtggcgtcgaccagaccctgggccacggccttggtgccggcggcgaactcaggaacctcgaacacgcccatcgggccgttccacacgacggtcttggagtcgacgatcttgtcgtggaagagcttctgggactccgggccgatgtccagacccatcttgtcggccgggatggcgtcggcggcaacgacttccggagcaaccggggtgtcaccggccgggaagccggcgttcacgacgacgtcggtcggcagcacgagctcaacgccgttcttctcggcggtctcgatgtagcccttgaccttctcaagctggtcctcttcaagcagggaggtgccgacctcgtagcccttggccttgaggaaggtgaacaccatgccaccgccgatgaccagacggttggccttgtcgagcaggttctcgatgacgccgagcttgtcggagaccttggaaccgccgagcaccacggtgaacggacgctccgggttctcggtggccttggacagggccttgacttccttctcgaccagcaggcctgcggcggccggcagatcggcggcaacgtcgtagttggagccctgagcgcggtggaccacgccgaagccatcggaaacgaaggcctcgccgagggcggcgatcttcttggcgtaagcggcgcgttcgtcggcgtccttagaggtctcctccgggttgaaacgaacgttctcaagcagcacaacgtcgccatcgttcatggcggcgaccttggcctgagcgtcctcgccgtaggtgtccttggccagcggcacgttggcgccgagcagctcgccgaggcgggcggcaaccggggccaggctcagctcaggaacgaccttgcccttcgggcggccaaggtgggccatgaggatgaccttggcgccttcttcgcgcagggtcttgatggtcggcagagcagccttgattcgaccgtcatcggtgatggtggtgccgtccagcggaacattgaaatcagcgcgaaccagaacgcgcttgcccttgagatctccaaggtccttgagtgtcttcatgaatatcctttccttgacgaatcgcacgtcaaagtggccaattttgccactttgcatattacaggcattccggaacaaaacaccgcattcgtctactgactgaatgcggtgttttgtcacatcgttgtcgcgttttgccgaataggcacggcaaatcggattgtcgggttacttgccttcggctgcgcgagccttctccgtcttctcggcaagttgaagcagtcggcgaattcggccggcaatcgcatccttggtgatttgcggttcagcgatcttgccgagctcctcgaggctcttgtccacgtgatcgatgcgcagctggccggcctgacggaggttgtccggaatgttatcgccgagtacttcgaaagcatgctgcactttttcgctggcttcggcggcggccttggcggaacggcgcatattggcgtcatcgaagttggccagacggttggccttgccgcgggcctcgccgtcggagcgcttgccggtccattcgcgggccgaacgggtggcgcccatgagcttgagcatgcgttcgatggcgtcgggatccttgagtgtcacgcgctcggagctacgcagcgtgcgatgcttggcctggatgcctagacgacgggccacgccacacagggccatggcggcctcttccgtggggcaagcgatttccaggaagctggccttaccgggatcggacaggaagccacgggccatgaaggcgccgcgccatgccgctttgatttgggcgatggatccgttgaccacttcagacggcagtccacggacctgctgcttgcggcggtcgaccagtccggtctgcaaagccaaggccactacgttgcgggtgacgagcaccacataggtctcgacagggccgttcggggtctgacgtgtgaggtgattgacctcggcttcgtgcccgaacgtgttcctcaacgtgttcttcagccattctgcaacgtcaagcgaggtgaatacggcttggataacgtatgtattctgtaccggtcgaagaccgccgccaaaacggatcatggccgcagcttgggccttgatcgcggctggcgaatcgccttcaaaggctgccaactcgcttttgacatcgtccagaagagccaagatctacctcctacagtcccgttcttctcaatgcttcaggcgcttcgtgccgttatctgctgtcacacggtcggaagccatcggctttctgtgatacctaatctggtggacaagcgaacccgtttgatacgtattatgggctctgctttctcgcagtgtggtcaccgaacgcttgcccgatgaccgctcgacgcctgcttacgatgagtgacgcttatgctgttctctcgcggaaacggttacgttgagcccatgtgcgcgtaagcggcgagccagctcttcgctcatcgccaccgaccggtgctgaccaccggtgcagccgacggcgatggttacgtagtgcttgtcttcctgggcgtatccttccaacgcaatctcgatagctttctcataagcgtcgagaaattccttggctcccttgctggaaagcacgtagtcggcgaccggcttgtcgtgcccggtaagctcgcgcaggttgggcacccagaacgggttgggcagaaaacgcacgtcggccacgaaatcggcgtcgatgggcataccgtatttgaagccgaagctgaagatgtgtactgccacggtggtggggccggagccgagcatcgcctcgtagagtttggtggacagctggtggatgctcagggagctggtgtcgatgacccagtcggctcgttccttgaggtcttccagcaggtgacgttcctcaaggatgccgtcgatcagtcggttgccgtgctgcagcgggtgcgggcggcgcacggattcatagcgcttgatgagcacttcgttgctggcgtcgaggaacagaatacgggttttgacgccgagatcatccagatggccgagcacggcggccagctcgtcgaaatagctggagcgcacgtcgatgacggcggcaagcttgtggacgcctgactccgatccggaaccggaggtggtcatcatgtcgacaagcgggataagcagtttgggaggcaggttgtcgaccacataccatcccatgtcttccacgcagtcagcggcatgagagcggcctgcgccggacataccggtgatgagcagcacttcgaaggcatcaagcggggtcggctggttgtccggagtcgatgtggatgtcgcggaattcgccggcgcattcgtggcggccgcctcgccggtatcgcggttcgttgtctgttgattcattacagcgcctcctcaagagctttgcgcatcgcgatctccagctggtcgtcttcggtggtggtgtcctgcagacgctggtcggcatcgctgggcgggtcgtcatcccagataccggtcatcagcaatacctgtacgagagcttggtacagcagcatttcttcgccgccgatggcgtgaccgccatgagcgcgccaggcttccatgagcttggtggggcgtggatcgtagatcacgtccaacagcagtccggagaatggctcggttccggcattggcgagggcatccgcgacgttgtcggccgcgtgtccgggaatcgtgttgatgacataggtggcgttgcgggctgcctcaagcaggacctgatcgtcgcctaattcgatttcgttgtacgggttatgcacgttgacgaacttttcggccactggtttaagcccggtgttttttccggggtgacgggcggcgacgacgatatggccgatttcgggcatcatgcagcatgcggccaacgccgaagtggcggtgttgccattgccgatgatcagcgcggtgccgcttctcgacgcggtgtggtgttcgccgagttcgcgattggcatggtcgaaggcgagttggatgccgatgacatcggtgttgtatagcttgatgcccggcttgccgttcggccaagcgggatcatcggcagccacgctccagtcgaataccgcggtattcgccaccttcagttccttggcccacaaattttccggaacaccgtacggttggatggtcttcttcaacggcatggtcaggctcaggccagcccacgtcgagtcaaggcctttgaggaaagcgtcgaggtcgtcttcccccacctcgtgcttgtcgtacagccaatcgtcgagtttcagcgaacggtaggccgcgttgtggagcacgggtgacaatgagtgtgcgacgggtttgccgagtacagcgcaacgatgattggccatatcccctccttgatgtctgttcccatgctagccgacactttgcttcgaatatgtcaaccacaggccccgcaaccgaaaatttactctgggctgctggaccgggccggctcactgctcgtgcagcgcggtgtacagcgcttcggctttggcgtggccgatgcctttgaccttctcgaagtcctcgacactggcttcgcgcatggctttgaccgagccgaagtggttgagcagccgcttctggtagctttcgccgatgccgggaatctcgtcgagcgcgctgcgcagggcgcctttgcgccgctgctggcggtggtaggtgatggcgaagcggtgggattcgtcgcgcacacgctgcagcagatacatgccttcggactggcgtttgaggatgatcggatagtcgtcgtccggcacccacacctcttccaagcgtttggccagtccgcagacggccacgtcgttcacgccacagtcctcaagcgccttggcggcggccatgacctgcggcttgccgccatcgaccaccaccaggttcggcttgtaggcaaagtgatgccggtttgtgttctgctggacgatgtcgggcggggactcccgcgcatcgttctgcactccgaccggcaccgcgtgccccttgccactgatgtcggaaccgccctcaccattgtcgttaccgttcgcagcgattgtctccgccgccacggcagtggtcatcttgccggcggccgaggccacacgctgttccgcgtcgatgctttcgccggagtcgccggcgatgttgccgtgcttgaagcggcgggtgagcgtctcgtaaagcgcggacagatcatccaccgcgcctttgccgtccttgcctcggatggcgaagcgtcggtattcggatttcttggcgatcgcgtcttcgaacaccaccatggaggccacctggaaggcaccacccacagtgttcgaaatgtcgtagcattcgatgcgcagcggggcttccgcgagtcccaatgccttggccacatcgttcatggcctgggtgcgtgcgcccatgtcggagatgcggctcatcttgctgcgttgcagtgcttggctggcgttctcgttggcgcggtccataagctgcttcttgtcgcctcgcgaggccacacggatggtcaccgctcccccgcgcagattggtcagccagccttcgagttcctcacggcgggccggttcgacgggcacgatgatttcgcgcggtaccggtgcgatgggtgccagcaggtccgcgcgcccggtggtctcctgacgggtgttgcgttctcgggtggcctgggcgcgtgccacagcgtccgtggccgtgatggtttgcgtggagccgatggcctcgcgattggtggagatggtcgcggccgactgggggtgattatccccggcggcgtccgaatacacctgcaccagaaggtcggccatcaagtcggcgtcatcgatgtcctcaactcgttcgacgctccagttgcgttcgccgcgaatcgagccggcgcgcacataaaaagcgtgcacggaggcttcgagctcgtcgctggcgaagccgaacacgtcagcgtccacatcctggtcgaagacgacggcgttctgttgcaccacggtttccagcatttggatctggtcgcgcagtcgggcggctttctcgaattcgagttcggcgctggcctctttcatgtcgcgggtcaactgggcgatgtatggccgtccgagtcgtccggtcatcacgccgaccagctgttcgcacagccgccggtgttcgtccgcttcaatgcggttcacgcagggtgcggagcatttgccgatggaagcgaacaggcatggccgtccggccagttgcgccttatggaacacgttggtggtgcaggtgcgtaccgggaacgtgcgcagcaaccggtcaagactgtgccgcaattcccacactttggcataggggccgaaataccgggtatcccgccgtttgcgcgaccgcgtgacccacacgcgcggaattcgctcccccgtgctgaccgcgagatacggataggtcttgtcgtcgcggaactgcacgttgaaccgtgggtcgaattccttgatccacgtgtattccaacgtcagtgattccagttcggtggcgacgaccgtccactccagactgcgtgcggtcagcaccatggtctgcgtgcgcggatgcagcagatacagcggctggaaataattggtgagcctgtttcgcaggttctttgccttgcccacataaatgacgcgcccttccccgtcgcgccatttgtacacaccgggtttggcgggaatatccgaggtcttgggtcggaacaggtcgcgagaatcccccagcaaaggtgccccattcgcattcaccttcgccgtcgtttccccggcacccacagctatgctttccgacattaacgccgccgcagtcttccgccactcatccggactatgccgctcaatatcgttcgtcataatcctcctcgctattaagccaatcatcagggattgggtgggttggggtgtgtgttgctggaccgtaaagacttggcctgagcggcccggagcgtgtccagcaacacacaccccaacccacccgaggtcagctgcaatggaaggctaaagcatgggtttcaggaacttgccggtccatgaggcttcgcattcggcaacctgttcgggcgtgccctgcgtgacgatggtgccgcctccgtcgccaccctccggaccgagatcgatcagccagtcggcctccttgatcacatccagattatgttcgatgacgatgaccgtattgcccttgtccaccagggactgcagcaccttgagcagcttgttcacgtcttcgaagtgcaggccggtggtcggctcgtcgaggatgtacacggttttgccgtcggatcggcgctgcagctcggtggcaagcttgacgcgctgcgattcgccgccggacagggtgggtgcgggctggccgagtcggatgtagccgaggccgacgtccacgagggtcttcaggtatcgggagatgccggtgtacgccttgaagaagtcggcggcctcctcgatgggcatgttgaggatgtcggccacggtcttgccgttgtacgtgacttcaagggtctcgcggttgtatcgtttgccgtggcagacctcgcagtccacgtagacgtcgggcaggaagttcatttcgatcttcagcgtgccgtcgccgtggcaggcctcgcatcggccgcctttgacgttgaaactgaagcggccggggccgtagccgcgcacctgggcttcgggagtcttggcgaacagggtgcggatcttgtcccacacaccggtgtaggtggcggggttggatcgcggcgtgcggccgatcgggttctggtcgacgtggatcaccttgcgcacctggtccacgccttccacgcgcgtgtggcggccgggtacgatgcgtgcaccgttgagcttgtcggcgagcaccgggtagaggatcgtgttgaccagcgaggatttgccggagccggagacgccggtgaccacggtgagcacgccgagcgggaagctcacgtcgatgttcttgaggttgttctcgcgggcacccacgactttgagcacctgggtcttgtggatcttgcggcgcttggcgggcacggcgatctctcgccggtgggcgatgtagtcgccggtgatggagcgcttggcttctatgaggtgcttggcggggccggagtagatgacttcgccgccgtgttcgccggcgccggggccgatgtcgaccacccagtcggcgcggcgtatcgtgtcctcgtcgtgttcgacgacaatcagcgtgttgccgagatcgcgcaggtggtgcagggtttcgatgaggcgttcgttgtcacgctggtgcaggccgatggacggctcgtcgagcacgtacatgacgccgaccagaccggagccgatctgcgtggcgagtcggatgcgctgcgcttctccgccggacagggtggcggccgcgcgcgagagggtcaggtagtcgaggccgacgtcgttcaggaagccgagtcgggccttgatctccttgagcacttcgccggcgatcagctgtgccgagccttcgagtttcaggccgttgatccaggcgagttcgcgtacgacgggcatgtcgcacacgtcgaagatggattttccgtccacagtgacagcgagcacttcgggcttcagacggcgtccgtggcagacctggcagggcacttcgcgcatgtacgactcgtagtattcgcgcatggactgcgaatcggtttcgtcgtggcgtcgcatgagcgtgcggatcacgccttcgaagccggtggagtattcgcgcaggcgtccccagcgattgcggtaggagacgttgaccttgaagtcgtggccgtagaggatgtcgtgcttgacgtcgtccggcaggcccttccaaggggtcttcatggagaagcccatttccttggccagaccttcgaggatgtggccgtagtactgggaggtcatcttggtgccgctccacggttcgatgacgccgtcggccagtgacttgtccgggtcggagatgatgaggtccgggtcgatttccagtttgaagccgagaccggtgcaggcggggcaggcaccgtagggggcgttgaaggagaaggtgcgcggctcgacctcgtcgagttcgagcgtgtgcccgttcgggcagctgcggtgttcggagaacggctggcggcgggccgggctgccttcctcctcgtccacgaagtcgatgacgatgctgccgttggcgagcttgagggcggtttccaccgagtcggtcaggcgttggcggataccgtccttgaccacgagtcggtcgaccacgacctcgatggtgtgcttcttctgcttggtgagtttgatgtcgtcggacagctgcgtcatctcgccgtcgatgagcgcgcgggcgtagccgtcggagcgcagcagctcgatcatatccacgaactcgcccttgcggcccttgaccacgggcgcgagaatctggaatcgcgtgcgctccgggtagccgagcagtgtgtcgacgatctgctgcggggtctgggaggcgacgggctcgccgcattcagggcagtgagggatgccggtgcgggcgaagagcagtcgcaggtaatcgtagatttcggtgatggtgccgacggtagaacgcgggttgcggttggtggtcttctggtcgatggagacggccgggctcaggccctcgatgaagtcaacgtcgggcttgtccatctgacccaggaactggcgggcgtaggcggatagggattcgacgtagcgtcgctggccttcggcgaacagggtgtcaaacgcgagcgaggatttgcccgaaccggacaggcctgtgaacacgaccatgcgattgcgcggaatcgccaggtcgacgttcttgaggttgtgttcgcgcgcaccctgaatcgtgatcttgagatcgttcgggatgtgcgagatatcagctaccagcgaaccatcgtgttcaatcagcggcgcctttttgatctcccggctcaggaaggagtcgctggtcatcaccttttcgacgatgacctcaccgttcttgcccttgccggttttcgcgcccgttgcgcttgttgcgcgccttgcgccagtctgcattgccgccacagccacaccccaccttccatctcaccgttcccgcgcgcacggtcatgcgcgcgccaaatctgtcccaaggatacccgaacacacgaccaaattcgaacgcttgttcgatggcgtgtcaggccggaaaaccgaaccatagtatgcaaaattccggaccatcagtggaccgaaacgcaagagccggcccccaagatactcggggcgtccggctctcacttccatttccccagcggggttggcttaccatgaagtatacacggttttaggacatcaatcactgtcgatgaacactgttcgaacatggccgaggaattcatcgtatcttccagtaccggcctgggcatcaccgtacgctcctagcagctgatcagggagccatagccttgcatcagtctcccctgcacagagttcgacacgaattggcccgataaatctgcggcttctcaatccatcgatgaaacggatatcgttcctgtcctgtgaaatctcgcgccgttcaagcacaagcgtgtccacgttgtattctgtttccagcagaggcagaagacgttccaaacatttacggcgagcgcgttcggcggtattccactggctcattggtaccgcagccacaatgacatgatcaatgtccattgcagccatggcatcaacgactttgccacgcaatgatggccgcatgtctcgccagtgcaatttccttgctcctttgggcttaagcaacgccaatctttgccttgtttcggtttccgtatcatcacatacgcatgcgcccatcaagtacataggcgagggaactccggttttccgcacactctcgtcaccccaagcggttgccatgtttgtcccttctcgcgcaacgcaaaacaacagttcgatagtatcggatagcagtgccggaccttgcagctatgcaatgccgttgcattattaatcggaaggcataatgtgagacgagaaaaagctaagccgttctagctcttggcaacatccccaatcactcagcctaaatcggcaaatcctgattttcaatggactccacggggatgccaagcttgcgtaattcgtcaactgcatcacgcatgggaatgcgttcctgttcgatacgccgataagcgattgttttgtcagcacacagtcgttcataaagacgtcgctccgccgattgaaggccgggcgccggcttaggctcccgcatagcaatcttcgcgctgcgttcagtacgatcggtaccaaatctgtggtaccgatcgtatgcatcgcaatccatcaggatggagcccgttgtctaaatgaaagtgcaacacccgttagattggaaattgcctagaaaaccagtccgaagggatgtcgcacctatgggagaagtatattcgcacctgtcggaagaggaacgccaggtcatccagatcgaggtaggcaacggcgccagcatacgcgggatcggcgcgatgctgggccgcagcccgtccagcatcagccgggagatcaagcgcaacacatggttcccgtccaacgagaacgagtcgtaccgcccgtaccggccgaaaagactgaaggcggggccatggaccggccgctactacatcgccgggcccgcgcagcgcaaggccgaccgcaggagatccaagccacgaaagccctaccggctgtcgcacgaccgcctgtgggcgcaggtggccgaatggctgggccgcggctggtcgccgctgctcatcagcggcaggctgcgcgtcctgtggccggacgatgcgctcatgcgcgtgtgcccggagaccatctaccgatgggtctactccagcaggccgcttcgggaacgctgggcgcggtgcctgccgcgagggcacaggcggcgccgcaggcacggcggcaggaggacgtcgcgcttcccgatccccggccgagtgcccatctccgaacgcccgccggaggccgacggcaggagcgcgttcggccattgggaggccgacagcgtcatcggagtgggatgcaacctgcacaccgaggtggagagaaggaccaggttcctcatggcccgcatcgttccggacaagaccgccggcgagagcgtcggggcgcagctggacatgttctcgccgctgccggccggcgcgcgcgtcagcgtcacgcacgacaacggcaccgagttcgcccaccacgaaaggctgcgcgacgggctgggcatggccacgtacttcgccgacccgtactccagctggcagcggggaagcaacgagaaccgcaacggcatgatccgccggtatctgcccaaacgctgcgagatccggatggacatggcaaaggaggtcagggagatcgtcgacgagatcaacaaccgccccatgcgcgtgctcggctaccgcacgcccgccgaggcgttcgccgacgaactgttagaattacaggaccaacaagggtgttgcacttctaaatagacatcggggagtcgcattcgatacctgattcacgtaatgtcgaaagtatttccagtccatccgcatccatatcaccccaatacacgatacgcatgtcacgcagtgcaggaaccgcaggtacagcatcgcttacagcgcgaccagaaccccatatgcagatgccctgcgcaatcggcggcatagtctgatacgtgtctttgttctcaacgatgacagcatatttaatgccggataacgcttcgccttcccacggacaccatatgatgcgttcgagctcagcatcgtcgcggaccggatcgagataacggaaccgcagttcggtcggccgttttgacagacccaacgtttcgacaccgagcagtcggcaaatggccttacgacgattggtttttgactcattcagccatttgccgctgaatcctgtcagtggaatctgtcgcggcgtcataccggtcacgtcatgatgcctgaaatatcgaactgcgctgacaagcagatcgaagtcgtcaggctgttcatggcctgtcatgcgagcggccgattcgattgtttccggagcaacgtcacaagcagcaaccagacatgctatgcggcggtgcgcttcgcgatattccgccgccagcgtacgaccaaccacacgcatggctattgattcgtcaggaacgacgactttggagatcaactcgacagaggtgcctatggtgcgatgcttggttatgatttcgcaaccattcttgcttgcccattgccgtatctcattgttgttgtcatgcactgcaatcgcattggtttccaaaaatgcttggtccggcaatcccaccggcacgggaaacggccatgccggttcgatgtcgtacatatgtgaacgcatatgtttcttcacgcatgtggtgatcgcagcgatgtctttcatgccggccatagttcccatcacctgctttcgaacatcgtcgagtcgaaccgaatcgtcttaataccggcgacgccgggactgctcattcggcaaccccgtcatccttcaatatatccgacgatgattcatcgtccatgtcattctggtacagcacggcctcgcgcagggaggtgaggccggtgtcggggtccttgtaggtcacgtaggccttggtggagacctcgaggatttcaccggtcttgctttccggggcggagacgatgacctggaatccgaggcgcggcagcaccgtgagggcgcgctgcgtgtaacggccgtcggccttgatgagcgcctcgtcgaggaacagcgtggtgtacgagggctcgctggtcaggccgccgccaagcaggtagatgagcgccgcgccgtatacgaacgaggtgagctcctgcaaggcgccgcccgagcgaccaccggtggaggtgatgcgttcgtccggaccgtcggcatgatgcacgatggcgtagaaggacgagcggcagcgcgggtcgagattgcgggcgccgtagcttttcacgccgttcgtgtccttgacctgcgcgagttcggcgcgcagcagcccgaccatcggcgcacaggccgcgaaggccttgcgcgaggcgtcggaatcgttgacgtcggcggatttccaatcgttcagggtgccgatgacgcggatgagctgcgtccagaaggcgcgctcgggacggcgcacgtccgcgtgcagggacaggctgccgtgcttgggaccgaactgttggcctttgagcatggcgttgatgcggtcaagctggtcgtggatgtcactggcatccgtgtcgatggcgcgtttgatggtcaggaagctcctgagcagctgttcgaggcagcgccggtattcggcgtcggtggcggcaaccgcggccagctgggtgaggctggcgagttcgtcgagatagtaccggtagtcctccacgctggcggtcagcgagtcgtcgtcggccgcgtagagcgcgatgtaggtgctcattttcgattcgacgccggtgcgcgcggcgtcggcctggccgttcagcagattgatgcgggaggtcatgtccttgccgatgccggcgatggtgcgttcggggaaactctcccccggcgcctgcgttcctgccgcgcccgcgccgatgatcatgtgtgcgcgcatggccgcgtccgccagcccggcgaatcggttgtcgtaggattcggcgagcgccgccgtgacttcgtccggcagcgggccggaagcggcgtcatcgtcattgtcggcggtggcaccggcggcgtccgtcgtgccggtgtcggcatggtcgcgcagccagatgagcgccgcttcgacggcgctgccggcgcgggccgcggcctggtcggattcgatgcgctggcgttccacacggtcgagttcggcgttcagttcgtcgcgctgtttggcgagttcggcgagtttgggatcgtttttgatggatgcgatggcgtcctgcgtgtccgtgatggtccgttgcgcgccggcgatgtcgatgcgttcccatgacgtgtaggcgagctggttggccagttcgagttcgcggtggaggttatcggactgtgttttggcggccgtgtagtcggtgtcggcttggctgagcgcgttgcgggcggcgtcgacctgcgctgcgagcgcgttgaggtaggtttcgttgacgaatccgatgacctgggcgcggtctttggtgccgtgctggccgcgtgcgccggatttgatctgaccgtcggcctgcacctgacggttggtgcggtcggtgtcgtcgatggcggtgacgcatagggcgtcgaatcgttcgtcctgggtctgcgagcgcagccagtcggcgaagggcgagtcgtcgcggtagcgcagtttgccggacagccagtcgccgtcctgttctccggtgagtatgttcgcgtgcgcgccggtgtcgtcgtagtggcgtgcggtgtccacgaactgccaggtgcgtcggggcatggtgcgcgggtcgatggtgctgactttggcggcgaagccctgttcgtggcgcttgtcgacgaggatggtctgggcgatgggcgcgtaggcgacgttcatggcgagacgccagtcttcctcgtgttcgttcacgtccatgagttcggccacgtacggcagttcggcgggggcgagtccggtggcgcggcagagcatggcgcgggtttcgtccatctgctgggagatgcgggtgcgctgggagcgttgccggtcgaagtcgcgttgcagtcgttcgaggtcgccgcgtgcgccggcccgcgcgttgatggcggcggtgagggcttcctcgcattcgccgtctcgtttgttgtattcgcgtttgaagttcacggcgttgatgcggcgttcgttccaggcctgttcgtcgccgggcagcgtctcgccgatggatgcgaacgtttgttcgattcgtgttcggttggcttgcacgtcttcgagggtgcggcgggcctggtcgagttcgagttcgagtcgggtcaggttgccgccgtccagaccctgcatctggcctcggatcatgtcgagacgggtgcgcaggtcttcggttcggcggcgcagcagcttggcttccgcctcgctgttctgttgttcggcgcggtcggcgggcagttggacggcgacttcgccgcgcatgcgggccaatgcccagtcgcgcagcacggccggtaccgtgccgtcgacggccggcttgaccggttcgaaggcgcgggccttgccgcgtgcggcggcgtattcgccgtaggcctgttggatgccgcgcagcgtgtccatgcggctggtcttctcgtccatggcgtggaagttctcgtcgtaacgttcgtagtcctcgaccgtggtgcgggccaggtccagggcttcgggcacgccgagcacgccttgtttgaagatgtcgtcgagccgggagggcgcgtcggcggactggatcttgtgcagcagtcgacaggcggcctcgctcaggcccattgcgctccagatgtgtgtgtggaacgcttcggcgctggggaatgtgaggcagtcggggtaggtggctttgagctgggccggcgtgaacggggcgtcacggtattggtccatgcgcctggggtccacgggcttgccccagaccacgtactgtcggcgcacgtcgccgcggccgtcgccgggcatcaggtagaggaatttggcgcaggagagcacctggccggtggtctggttgcgataggtgtccacgatggcgccccacacgggttgcggtgcgccgttctcgtcgcggccgcgcaggtagagcggctcgtcgccggtttcggtgctgcccacgccgaccatgccgcgcaggtaggtgtagtcgctgcgttcggagcggccggagttcgaggccttgttgaacggcgtaccggttgggtacagcagggagatctgcgcgtcgaccagcgtggatttgccggattcgctggcgccggcgagcagggtcaccggcagcttgtggtccgtggaggggcggaattcgtggtagccctcataggagccccagttgatgagtcggcgggattccagcatccaccggtccgcgatcatctgcacgtctgtcgcctgcatcattcggctcccttctcgtcgtcatcgtcatcttccgtgtcgccgtcgccgtgttccgcgacgtcgagccaggtgtcggccagttcgcggtcgagcaccacgggcacgagcggcgtgatctggtacatggcttcgtcgtccaggcgcaccaaatacccgtaggtgatcatcgcggagacgatggcgccgatctgctttgccacgccttcctcgtcgttgcgggcggccagatagccggcgccggtggcgagcgcggcgcggatctcctcaaagctgacgagccagtcggcggggtcggcgtgcacgttctcgtattcgaggacgcggatgcgcaggaaggcgagcagcgcggcctcctcgcgtttgaggctgacacgggttttgagcgagcgcagggtcacgtcgtcgccggccacgggcgtggcgtacatgatgcggtagcgttcgttgatcaccaagtcgagcaggtcgttgttcagggagcgtacgacggcgtcgcggttgtcgagcacggtgtcgtaggtgggcccgctgatatagcggtcgcgtttgagggcgatggcggccatgcgtgcctcggccggcatgtcgccggtgtcgccttcgaacagggcgtacgggttggcgttgtccatatgctcctcgtgttcctcgtgttcctcggccacggtcatccttcctccacaatgatgctcagctcgtccatgtcggccagcaccggtctagtgatccagttccggggctcgccgtcaatcgatatgcaatgccagatcgcagtatcgccgcgctgcgccggggccggctcggtggcgatgtcgctgtcgaccccgacgccgacgccgtcagtggacggctcgtcggcgatggcgttgccgcttacggctcccagcctgcccaggaagccgacgatctcgctttcgcggcgttcgctttcgggcagccggttgaagctggcggcgatgtccacgagggttgcgccgggcctgtcatcggacctgtcaacggtcaccgggttgcgccggatgaggctgaccatgcgcaggagtcgggggccgccgctgttgaccatgtcccgcagatcggccaccggagtcgactgcggggcttcggcggcgaggtcgctcaggccgggtgcggtggcgcgggtcatggatttggccgggcgcatcggcaatggcgcgaacagcgcgtccgaggtggccgtgtcgtacgggcgcgaggcgtctcccatatgggttttcgcatccgcgttgaggcgcgcgtacagtcggttcaagcgggtgagcatcgtgcggtagcgagtgtcggtttgctggcgcacgagccggctgatcgcctcgtcggagacgcgcatctggcggcgcacggcttcgatgccgtcgtagatgcgggccagttcgtcgcggatctggccgagcagcacgccggattcgccggccagatacggggttttggcgatggcgcgcagggcttcgtcgatttgctggcggccctcgtcggtgatgatcacctggaaggcgtcctcgaagcggcggccgctgtctgattcgctgaacgagcggcggtattcatcgtggtagcgggtcaggttctcgtccacgctgatgtcgccggcctgcatgcgccggcgcaaggcgtcgccgttgtcccgctcgtcgagcacgagttcgcgcaggtcgatgggcacgccgcgcagcgtgttgtggatcacggcgatcacgtcctccacctgggcttcgctcagcgtggcatgctgcttgccctgttggatgcgtttgatctcgtgcttgcgttccttgatttcacggttgaggagtttgatgcgctcgccggggtcggcggtcagctgcatgcgcgcgtgctcgatttccatgatgatgctgttggcctgcgcgccggacagggcgcgtgattcgtcttcgagcctgctcagcgcctcgatggcgcggtgggcgcgggccgtcaaacggtagaggaatcggtgtgaggccgcatcatgcgagttggcgagccaggcgtagtcgccttcgccttcacgggtcaggtcggcgaggatctgatgagcggcctcggcgaaggtctggtcctcgcgcggcgcatattcgccggcgtcggccagagcgttcagactttgcgcgaaccgctcctccacggtctcgcgcggcagctcgccggtgagcgggtcgaacgtggaacgcagcagcgacacgtacagcatcgcgttctggcgcaacagcaaccgcaggacgcccgtctcatacaccggtcgcagccgttccagctcccgcatcacatcggccacagcatgcctccctctgtcgtgaccgcaccatactagccgatagccgcgaaccacaccccgcccgcgccacgcccttcgccccccccacagggaggggcgccaagccatgctaaaaatcacagacagactattgcctttgcgggaaatcatcgttagattggcgagaggaatattgtcaatgcatacgaaacggaaaacatcgtgaccgcaccgaacacgcccgccgaaacctctgaccagctcaacaagcccgccaaatccggcaaactggaggtctccgacctcatcaccatcggcgtgtttgcggccctgtacttcgtgatggtgtgcatcgccacactggtgagcaccctgttcaccggcggcttcggctccatcttcctgcccgccatcacggccctcatctccggctgcgtgtacatgctgctggccgcacgcctcggcaaattcggcggcatcaccgtcatgggcgtgatcatcggactgttcctgttcatctccgggcatttcgtgctttcgttcatcgccagcatcgtgttcccggtggcggccgacctcatcgcgcgcgccggcaagtataagagcaaggcgctactgctcgtcagctacgtggtgttctcctacggcctgaccggcccgatcctgcccctgtggttcatgaaggacgcctacgtggcgagcctgcaggcgcgcggcaaggacgcagcctacatcgacggcgtattcgtcaacatcaacaccggcacgttcttcatctcgatgatcgcgattctggtgtgcgcggttctcggcggctggttcggccagcgcatgatgaagaagcacttcatcaaggccggtatcgcctgatgaatcctgcccgccggacgctcgatccgcgcgcgaaactctaccttctgctggtggcgaacctcatgctgttcttccacgtagggctcgccacgcaaatcgtcatggtcgtgctgttcctgctgcccctgctggcggccgcccgatggcgaaccgcgttgaacttcggcgtgacctatgcagtactcaccgcgctgggaatgctcgaccccgatgccctgggactgccgtggctgcatgtggtctccgcgctggccgtgggcgtcacgatgatgctgccctgtttcatcaccggcgcgtatacgttcaccaccacgtccgcgagcgcgttcatctgcgcgatgcggcgtatgcgcgtgcctgaggccgtggtgattccctgtgtggtggtcatccgcttcttcccgaccatcgccgaggattaccggcagattcgcaatgcgatggcgttgcgcggcatcgcctccggcggctgggggctggttcgtcacccggcccaatcgttggaatacattctgattccgctgctgatgaacgccaccaatgtggcacaggacctgtcggtggcggcactgaccaaggggctcgggcgtgagggcgagcacacctcgcgcacgctgatccgtatgaccgtggtcgactggctggtcatgattgtggtcactttgccgctcgcgctcgatatcgcgggggtgatctgatgggtggcaaccaatcgcagccgaatgcaactgccattattgggaccggcaagggtggcccactcgacacgtctgcgggaaccatcgcctcccgtggcatctcctttacctatgaccatgccgcagagccggcattgcgcgacatcacgttgaccgtgcccgcaggcgagtgcatcgtgctgtgcggggcgagcggctgcggcaaaaccagctatacgcgcgttgccaacgggctcatcccctcattcttccatggtgcgttcgccggcaaccagaccacgtgcgggctggatgtggagaccgtgccgatcgaccggctcaccccgctggtcggcagcgtgttccaaaacccgaaaacccagtatttcaacgcgaacgtcaccgacgagctcgccttcccggccgaaaacatagggctgccggccgaggacatcaatcgtcgtatcacggccgtggctgagcgctttggcattgggcatctgctgcatcgcagcatcttccacctgtcaggcggccaaaagcagcgcatcgccgtggcggcggccaccatgctggggcccaggctcgtggtattggatgagccgaccagcaatctcgacgcgaacgccatcgcggacatgcgcgccatgatcgagcagatgaaggacgaaggactcaccatcgtaatcgccgaacaccgactcgcatggctcaacggcgtggccgaccggtacgtggtattcgacggcgggcatatcgtgcaggattacgaggccgatgaattcctgtccctctcccccggctgcgtggccgccatgggattgcgggcgttggacctgcaaccgtatcggcaccggattgcgacgctggcttcaagcccggccgcggatgagtgcacttcggcattgctcggcacccataacctcaccatcggatacaaaggcaaggacggcttcacccgcgccatcccggacctgcggttccgtgccggcgaaatcaccgggctcatgggcaacaacggctgcggcaagaccacgctcgtgcgcacgttgaccggactcatcaagcctgtttcgggccgcatcgagctcaacggcgtgcccgcgaaaccgcgcgacctgacccgcgccggattcctggtcatgcaagatgtcaactaccaactgttctccgacagcgtgcgcgaggaactgctcatcggactcgacgagacggatgccggcatcaccgctcaagccaatcaggtcatggccgatcttgaccttgcagcgttcgtcgaacggcatccgatgagcctgtccggcgggcagaagcagcgggttgccatcggctcggcattgatgtgcggcaaggacctcatcatccttgacgagcccaccagcggactcgaccgctaccacatggagcaggtcggcgaactgctgcggcaactggcgagccaaggcaaggcgattctcgtggtcacccacgatgaggagctcgccgccggctggtgcgaccgcattgtcaatcttggcgccgacgattccgggaacaacggctcgcatgccagtaacccagatgccagcagccccaaccctaatgcctctaccaatttcgccaccgcatccacccatgaaaggaacgcgcaatgaccgccagcaacaccacggattccacggccttcgacatcaccgactggctcggtgaatgggaaagcttcgagcattacattgattcggatgacgccgccatccagcagacctgggaagccgccgagcaggcggtgctcgccaacccgaagatggccccgatggccgcgcgcggcatcaggacgttctggtcgatggcttgctccaccaccagcccggagaacatcatccatatcggctactggcgtgtgaacgagccggccgccgaatccggctccacggacgatgccgcgctcgccatcgaatggttcgccgaggacgacaccagcctcgacacctacgaatacaccatcgaccatgtcatcgagcacggtctcgaaggctcccccaccttcgtgttccacaccaccgatccggccgccgaagacagcccgttccgctggctacttgccatcaatccgctgccttcgcgcaaggcgttcgccgagggcgggctgctcagccacctgcatttccagtacgccaacgatctgcacacgctcgtcgccacggatgaggccaccggcgtcgagaccttgcgcaatccgcgttggtacgccaccatgtgcgccaacgagggaaccgtcgaggaccgttgcgccatcatccgcgcgttgcaccacttgcagtagacctggcaacatacggcagtgacggctccccactagtgaaactagcatcgcttcagtagccgtgcgagtgcagatactcgtcatcgaagccgaaaaaatggccgatctcgtgcaacacggttttgcggatccgttggcgcagctcggcctgcgttgagcatacgcgttcatgcggccccttgaacagggtgatgacgtccggcatcacgccgctgtagcccgtagttcgcttcgtgacgggtatgccctcatacagtccgagcagctcaccgcacggattgctcattgtagccagttcgcgctcattgggttcgtccgcaacgacgatgccgacattctccagcacccgcgcaaaccgttcaggcaaatcatccaacacctgttcaatggcccgttcaaactcatcgtcactgatgtgcattcgctctccacacgcgaaatgccttggcaccaagtatgtaccaaggcgctgaaatctcagactagcaggctcagctgttgcggttgatctcgatgtcggtgacggtgaggttggcctcgttgatcaggttgaagaggatgacttcggccagcgggccgggctgcatgaaggtgtgctgcttggcctcggagacgtagtcgcgactgtcacggtagaaagcggtatcaatgccgcccggatagacggcgaccaccttgacactggtgcccttgtatgcggcctgcaggctcttggtgtagcctttctcaccccacttggtggcgcagtacacgctttcgttcgcgttgccgcgtgtggcggcggtgctcataatctgggcgattttcacgttctgctcgccgcaggccttgagggtttccaccgtccacagaatcatgcctttgagtcccttgagacatttgtcgacgtcggcggcctcgtaggcggtgggcaccttgaacgaaggctggccggcgttgttgatgagcaaatcgatgtggccgagcgtggcgatatccgccacggattccttcacgaacgcttcgtcggtgatgtcgccgacgtaggcgcggtaggagtcatcgggccactgcgcggtcagttcggcctgacgttcggcattgaagtcgacaccggccaccagccagccgttggcgatgagctggctggcgagctcgtagcccaagcccagcgcgctgccggtgacgatggcgattttcttacctgttgtggttggcatggcagacctctcctactactattcttcggctacgagtttactactattcttcagctacgagttcgaggtacgaatcattccagaggtcttcgtcgccgtcgggcatgaggagcacgcgctcggggttgagcgcctcgacggcgccctcatcgtgggtgacgagcacgatggcgccctcatacttggcaatggccttcagaatctcctcacgggaagcggggtcgaggttgttggtgggctcgtcgagcagcagcacgttggctcgcgaggtgaccagcgtggccagagccagacgggtcttctcaccgccggaaagcacgtgagccggtttcatcgcgtcgtcaccggagaacaggaacgagccgagaatcgaacgggcctgcgtgttatcgagctcgggcgccacatgctgcaggttctccaacacggtggcgttcagatccagggtgtcgtgctcctgcgcgaagtagccgatcttgcagccgtgaccgtattccacggaaccggtgtccggctcctcgatgtgggccagcaggcgcagcgtggtggtcttgccggcaccgttgtagccgaggatcaccacacgcgagcccttgtcgatggccaggttcacaccggcgaacacgatgttggaaccgtaggccttggaaatatccttggccatgatcggcgtgcggccgcagggcgcgggctcggggaaacggatgtccgccaccttctcggccttctgcgcctcggaggtgttttccagcagcttttcggcacggcgcatcatgttctgcgccgccacggccttggtggccttggcgtgcagtcgaatgccttgcttcatgagacggtcggccttcttctcggccacttcgcgttcgcggcggcgtcgctcctcgtccaccacgcgctggtgcaggtaggccttccagccaagcgaatacatgtcgatctggccgagctgcgcgtccagatgccagaccttgttcaccacttcgtccagcagttcggtggagtgggagatgaccaggaagccgccctcgtacttcttcaagtagccgcgcagccattcgatggaatcggcatccaagtggttggtcggctcgtcgaggatcagggtgtcggcattggagaacaggatgcgcgccagctcgatgcggcggcgctggccaccggagagcgtgccgagctgctgctccatgacctcctgcggcaggccgagcgaggcggccatggagatcgcctcggactgggccgcgtagccgccagccttgtcgaagtcctgcatggccttgtcgtaccgggtcatggccttgctcatcacgtccggatccgggtcggtcatatccttttcggccttgcggatgcggttgatgatggtggcgatgtcgcgcgcgctcatcatgcggtcgagcgcggtctgtgtgggatcggaggcatgcgtgtcctgcggcaggtagccgagcttgccggagacgcgcaccttgccggcggtgggcagcatgtcgccggtgatcacgcgggtcagcgtggtcttgccggcgccgttgcggcccaccagaccgatcttgtctcccttggccacatggaagttggtggggtgaagcagcgtgcgcgcgccgatctgaatttcaagtccctgcacctcaatagccatgaataacctacttgcctgttacgaatactgtctcttaccaaagtccgactgtccatcatagcgaacaccatgccgaccgggctcagccgacgctcatgcgtccatacgcagccgcgcaactgatcggcaaggtgaagaatgcgacgcccggtatggtaatcgccctgtatggtgtgatgcgtctcgtgttcgccgcgttcaacgtgagttttggtggcgtggccgggttcgtgcgtccggtcattatgccaatggcggtgggtgcgattgaagcgtccggtcacaaaccgaacggcacgccgaccatggaaatcgcgaccatggcgcacggtatcgaagctgccatcgaagccgctgtgagcaccgaaaccgacgccaccgacatcatgggcgaaacccactaacgtacagacaacgatgcccccgccgacaacttctgtcagcgggggcatcgctatgcgttgaacgttacagttcgcgcaactgggcggcgatctggatggactcgacgctggcctcggccttgttgcgcgtctcctgccattcggtggcgggcacggagtcgagcacaatgccggcaccggcctgcacgctcgcctcatggtcgcgcaggaacgcggtgcggatggcgatggccatgtccatgttgccggagaaatcgaagtagccgacggtgccgccgtagatgccgcggtcggccggttccaactcgtcgatgatttcgactgcgcgcggcttaggcgcgccagacagcgtgccggccgggaacgcggacttgaacacatcgaatgcggtcagcgaggggtcgaccttgccggtgaccgtcgagcagatgtgcatgatgtggctgaaacgcttgatgtccatgagctgcacgacttccacggactgcggcacgcacaccttactcaggtcgttgcgagacaggtcgacgagcatgatgtgctcgctgcattccttcggatcggcaagcagctccttggcgaatttctcgtcttcctcaggggtggcgccgcgagggcgggatccagcaatcgggaaggtcatcgcgtggccgttgtccaccttgatgagggtttccgggctggagccgatcacgttgaagtcgcggccctgagcgtcggtcaacgccatgaaatacatgtacgggctcgggttcagcgtgcgcaacacacggtacacgtcgaacgggtcagcaggcgaatcgatgtcgaggcgctgggagatgaccacctggaacacgtcgccgtcgacgatgtactgcttggctcgttcgacggcctgctcgtagtggctcttctcggtgcggaagcgcagctcgggttgggcgaccgtttcgtccaggatgttgacgcgggactcgtccggagccggggtggcggcatcgcgctgcatctggtcgagtcgagcgacggcctcgttgtaggcagcgtcggcgcgagtggatttatcatccacattcaccgcattggcgatgagccataccgaaccggatacgtggtcgaccacggcgatatcggtggccagggcaagcacggtctcaggctggccggtctcgtccggagcttcggcgcgcagggtcggttcccagtggcggatggcatcccagccgaccgtgccgaccagaccgctggtcaggttcggcaggccttccacgtgaggggccttcagagtcttcaacgtggcgtgagcgacttcgactacgtcaccggtgacgggcacgccgaccgggaccttgcccagccagtcggcctgaccgttgttggagcgcagctgggccatcgagttgacgccgataaaactgtaacggctccacgtgccgccgtattccgccgattcgaggatgaaggtgccggatcggccgccggcgagacgctcgtagaagccgaccggggtgagcgagtcggcgagcagacggcgcacaatcggaatcacacggtatccggcgtcggccagttcgtggaactgttcgcgactgggccaggtggcgccccacttcaggtgtttgacgctgcattcgctcatattcgctcctttgcttacaactcgatgtcttgtttcatagtacgcggtcgctcggcttccctcagtcaggaaagcccgttctactgctcggccgggcgatggccttcgaccacgggcagggggccgccttcgaggaagcagctgcgcttgccggtgtggcaggcggcaccgacttggtcgacttcgacgagcagtgcgtcgccgtcgcaatccagggacacgcccttgacgtattgcacatggccggaggtatcacccttgcgccagtattcctgacgggaccgggaccagaaggtcacgcggccggtggccagcgtacggcgtaatgcctcgtcgttcatgtagccgaccatcagcacctcgcgtgtgtcgtactgctggatgacggcggcgaccagccccttggcatcacgcttcaggcgtgcggcaatacggggatcgagttcagtggaattgtcgtatgtagtgtctgtcatacctatcttctttttgtggaccaccctcagtcagcttcgctgacagctcccggattatgtgcgacgtgcgcatagcgcattgccacgagcaattcactggattgttcgcccagcgggagcaaggtgtattcgtttagcgaacggtgtagccgtgcttcttgagttccgccttgacatcggcgatagtcaggatgccgtaatggaacacggatgcagccagcaccgcgtcggcacctgcttcgatggcgggcgggaagtcctcgaccttgccggcaccgccggaggcgatgatcggaatcttgacttccttgcgcacggcgcgaatcatctcgaggtcaaagccttccttggtgccgtcggcgtccatcgagttaagcagaatctcgccggcgccaagctgctcggcgcgcttgacccaccagatggcatcaataccggtggatttgcggccgcccatcgtggtgacctcaaaaccggactgcgtatgctgctcacccttttcgcggcgggcatccacggagagcaccagcacctggttgccgaaacgatcggccacacggctgataagcgacgggtcgttgatggccgccgtgttgacaccgaccttgtctgcaccgcagcgcagcagtgagtcgacgtcctcgggcgtgcgtacgccgccgcccacagtcattgggatgaacacctgttcggcggtgcgggagaccacgtcaatcatcgtgttgcggtgggagctggatgcggtcacatccaggaaggtgatctcgtcggctccctgacggtagtattcggccgccagctccaccgggtcacccgcgtccttgaggttctcgaaatgcacacccttcaccacgcgaccggcgtcaacgtccaggcacgggatgactcgtaccgccaacgacatgcttcactcccctgttcggctttgcattacagtccttcagactacctaccgcccgttacatgcgccgcacctgtttctggaatatgagaatcatcatattgagcaccgacatggcagccgctcggcgtgagagaatggctcgtggaagttgtccgccgaatcaaggagattggcatggctgtcgaaaacagcacggtactgatcatcgtcaacaactggggtatcgaggagaccgagctgacgcgcccgctgcgcgatctcaaggccgccggcgccaaggtgacgcttgccgccactaccttggacccgtgtgagacggtgcagcacgaccgctacgaaggtgaaacgctgaccccggacgcgcgcctgtccgacgtgcaggctgccgactacgacctgctggtggtgcccggcggcacctgcaatgtggatcgtatccgcgtcaatgaggatgcgatcacgctggcgcaggagttcgcgcacgaaggtaagccgatcgccgcgatctgccatggcgcgcggctgctggtcaacgcgggtctggtgactggcaagaccgccgcgccctgccgctatatcgccgctgatatcgagaacgcgggcggccattacgtcgacgagcagctgcacgtggacgacgccaacggcttcaagctcatcacgtcccgcaagcccgacgatctggactacttcgtgggcgcaatcaaggatgcgctgaagtagctaccgctccttggcagcgagctggccgcaggcgccgtcaatatcctgaccgcgggtgtcacgcagtgtggcggtgatgcccgctcggtgcaggatctccaggaaccgctgttcgtcttccggcttggaggcggtccacttcgagccctcgatggggttgagcggaatcgggttgacgtgggcccagttgtcgccgtaatggttaagcctcttggccagcaactgcgcatgctcggcctggtcgttgatgccgcgcatcaacgcgtattcgatactgacgcggcgcttggaggccagccaataatcgtgcgcggcatccaacacctgcttggtattgaaacgcttgttcatcggcaccagctcgtcacgcagttcgtcgctgggggcatgcagggaaacggccagacgcacgggaatgccttcggcagtgagcttcttgatgccggggaccacgcccaccgtggatacggtgatgttgcgcgcggaaatgccgaagccttcgggaggcatggcggaaatctgtcgtacggcggacagcacggagttgtagttgcccatcggctcgcccatgcccatgaacacgatgttgctcaggcggccctctcccccggccacttcgccgtcgcgcatcatcttggcggccacacgcacctgttcgattatttcaccggtggacatgttacgggtcaggccaagcttgccggtggcgcagaacgggcagcccatgccgcagccgacctgcgaggagatgcacagcgtggtgcgggtcgggtatcgcataagcaccgattcgatgagggagccgtcgaacagcttccacaaggtcttgatggtggtgccttcgtccgccacttggcgggtcacctcggtgatgagctgcgggaaaaacgcggcggcggcctcgctgcgcttggctgccggaaaatcagtgaattcggcggcattcacatcgaaatggccaaagtaatggttggcgagctgcttgactcggaacttcggcaatccgagttcggccgctttctcgacgcgctgctcgggcgtcatatccacaaagtgcagcggcggcttaccacggcgggcatggtccttggatagcacgtcacggaaggcacctgatgtgccgccgggagtaatgccggtttccggagtgtcaggatgctgtgtggtcatgatgggttcgcttcgctctcgatatcagaaaatagtcaaacatgcaatagaaatatcagaatccaccatacggcgtgccgcatacgaatcagatggcccatgtcttagcccatagcgaacgcatattgaacgatgatttccccatatatggcatgtggcaccgtgcgatatacacacgatgccacattgttcatgcacgaggcatgcgaatcacagtccggtgatccacagcaaggcgcaggcgaacggtgcactcatcaaaatggaatccacacgatccatcacaccgccgtgccccttgagcagatggcccatgtctttgataccgatatcgcgcttgagcatggaagcacacaaatcaccgaacgtgcccacggcaccgatgagaatacccgccacgatcggcacccaccaacgagtggcccatttcgaggcatcatacgtgcatgcgaatacggcaaatgcgccagccatggcgaagagcatcgagccgacaaggccctcaacggacttcttcggcgagatgcgcgggctgagcttgtgtttgccgagccaggcaccggcaaacaaaccgcccgtatcggatagggcgggtaggaacaccagcatgatggcgtgtgcaatcggatgcccattaaaagtcagtgagatgatgacgcagctggccaacaacggaatatacaacacggtaagcacggacacagccacatggctgagccgggaatgatgctgttccccgccctcatgattaaacgaggattcgaggcgcgcgctggcatccgtgttggacagtttgccggcaaccgccagagataggcggttgccgacgctgatttttgcgctggccgcgatggcgaccagaataatcgacacgatgatactcagcgacatcgtgatgagatggtacggggaatagtaggtggcaatgagggtgaaggacgagcacagccacagcataaacaccgggaggtgcaggcccacggtggcgaagtccaccctgagctcccacagcgccagaatcatgaacatgactaccagcagcacgaagaggtcgacgctgagcagcaggcacgcgacaataaggatgaccagtgccgcgcctgtggcgatggcctgcggcatgttgcggccggtcttcttgttgatctggtcgagcgtctcctcggcctcttcatggagttgttcgttgcgttccataattctccggacctggtctgaatcagacctccatgatctccttctgcttggtctccagcagagtatcgatctcgtcggtaacggacttggtgaccttgtcaagatccttcagcaggcgatcgccttcgtcctcacccatttcgccgtccttgacggccttgtcgatggtttccttggtcttacggcgaatgttgcgcacggcgaccttgccatcctcggccttgcccttggcgagcttgacgtattccttacgacgatcctcggtgagttccggcatggtcagacggatgacgttgccatcacggttcgggctgatgccgaggtcggagttgcgcagggccttttcgacggcaccggcctgggaagcgtcaaacggggtgacggacagagtgcgcggttcgggaacgccgatggaggcgacggccttaatcggggtgggggcaccatagtagtccacggtgatgccgttgagcagggccgggtttgcgcgaccggtgcggatgccggagaagttttccttggtgttttccacggtcttggccatctgttccttggcctggtcgataagagacatattcactccttgtgtgttggtgttcgtcagtgttgttcgtctatgaacgcttgattcgattgtgggcgtttgcggcttactcggccacgcgcgattcggcggtggagaccagcgtgccgatttcatcgccgacgagggcgcgggtcacgttgcccggctcttcgaggccgaagacgcggatgcgcttcttgttgtcgcgggccatggacagtgcggaggcgtccatgacggccagattgtccacgagggcgcgattgtagctcagggtttcaaaacgcttggcgttctcgtccttgcgcgggtcggcggtgtagacgccgtcgacgccgttcttacccataagtacctcgtcgcagtggatttcgagggaacgctggatggaaaccgtgtcggtggagaagtacggcatgccggcaccggcgccgaaaatcaccacgcgacccttttcaaggtgacggatggccttgagcggaatatacggctcggcgacctgtcccatggtgatggcggtctgcacgcgggtggcctgcccctcctgctccagaaagtcctgtagagcgaggcagttcatcaccgtgccgagcatacccatgtagtcgccacgggaacgatcgataccggcctgctgcagttcggcaccgcggaagaagttgccgccgccgaccacgatggccacctgcacaccctgttgtacggccggaacgatctcctcggcaatgcgacgaatcacctgggtatcgatgccgaccttgccaccaccgaatgcttcaccggacagcttgagcagaactctgcgcggattgtcgctatcagtcatattgtgcctttctcaaaaccgaaagtgcgaaattatccgtagacaagcgtatcggtttacgacgacaccccctagcaacgacacccttggaatagcgaaacgccatccgattattgaataaccggatggcgtttcgttgaaattacgctaagcgcgtggagtaagccttaggctcactcctcttcgcccttgccgacctcgacacgagcgaatgcggtggcgttgccaccgacttccttgaacaggtcgccgacggtcttggacgggtccttgacgaacggctgctcaagcagcacgacttccttgaagaaagcgttgagacggccttcgacgatcttcggaacgatcttctccggcttgccctcggccagggacttctcggtggccacgcgacgctcggactcgaccacatcggccggaacgtcctcgcgggtcagccacttggcgcccatggcggagatctgcagagcagcttcgtgagccacggcggcgccggccttgtcggtggcgatcatggcgacgatgctcggcggcatctcggcggacttcttgtgagcgtagacttcgacgtgctcgccggagatcttggcgaactggccgaccttgacgtgctcaccgaacagggcggcggcctcttcgacagccagcttgacggtggtgtcgccagccttggcctcgagcagctcgtcagcggagttggcgtcggcgtccacggcgtagccgagaacttcctcggtgaactcgacgaacttcggggtcttggccacgaagtcggtctcggagttcagctcgacggcgtagccggtctcgccattggcggtctcgacgaccttggaggcgatggtgccttcctgagccttgcggccttcacgcttgccggctgcggcgatacccttggcgcggatgatttccttggcgcgggcgacgtcgccttcggcttcggtcagagccttcttgacgtcgagcatgccggcgccggtgtcttcacgaacctgcttgatcagtgcggcggtaattgctgccattgattattctccttgagaaattttgcttacccgtgaacgatgggaagcgcttattcaggcacttcccatcgtagagcatcactcggccttgggggcctcggcggtttcgccctcggcggcagccggagcggcggcttcagcggaagcctcggcaggagcctcgttggtcaggagttccttctcccaagcggccatcggctgctcggcggcttcgccctcggccttgttggcgccggagcgctccagcagaccttcggcgacggcgtcagccatcaggctggtcagcagttcgatgccgcggatggcgtcatcgttggccgggatcgggtactcaacggtgtccgggtcggcgttggtgtcgacgatggcgacaaccgggatacccagcttgtgagcttcctcaacagccagggcttccttggtgatgtcgacgacgaacatcgcggacggggtgcggttcatgttgcggataccgcccagttgcttgttgagcttgtccttctcgcgctcgagcaggaggagctccttcttagtcaggccggagccgtgcacgtcggtgaagtccatttcctcaagttccttgaggcggttgacgcgcttggagacggtctggaagttggtcagcatgccgccgagccaacgctcggagacgtagggcatgttcacgcgggtggcctggttggcgatagcttcctgagcctgcttcttggtgccgacgaagagcacggtgccgttgtgggccacggtggtcttgatgaagtcgtacgccttgtcgatcatgtcgagcgacttgaacaggttgatgatgtggatgccgttgcgctgggtgaggatgaactgcttcatcttcgggttccaacgacgggtctggtggccgaagtgcaggccagccttcagcatatcgctcatagtgatctgagccatggtattactacctttcattgtcggttcttgcctggccatgcgcacctgcgtgcagctgctcccccggtttcacgagttgtgcagccgaccgacacaagccgtcgcgagcatgacgcgaatttgttgtgtgccggttgacaatattgggtggctctggacaccagcgactgcgtccgttgccgggtggcacacgagtttcgagaatagcacggagccggtactaaaaaaaacaggctcccctctctgaggggagctgtcgccgtaggcgactgaggggagtcacgggcggtaccggcagaaccaccctcagtctcactacgttcgacggctcccgccagcgggagccgagtatggactacttcgcctgacgattacgcatgtagcgcagggcttcgcggcgttcttccttttccaggcgatccaaatacacgtggccgtcgaggtggtcgcattcgtgctgaagcatacggcccatcagcccggagccctcgagcacgacctcgttgccgtccaagtcgatgccacgcacgcgagcgtagtcggcacgacgggtcttataccacaagccgggcacggacagacaaccttcatcgccatactgctcgccggacttctcctcgagtacggggttcagaacgtagccgaccttgccgtcgatgttgtaggagaaggccctcaggctcacgccgatctggttggcggacaggcccgctcggcccggatcgtccacggtttccaacaggtcgtcaaccaggcggcgcacggccggggtgatttccttgatctcatcgcagggggtgcgcaggactgggtcgggcacgaccctgatctcacggatggccacttctcgttactcctcattcttctcgtcagccggctggtccggcttgctgccggtgtcagcggcattgtcagcggaatcgccggtctcgccctcttcgggttcggccttcgacttcttgatcttctccgacacgctagcaatcgaatcagacacgctggttttcatctgttccgaagcctgtttgacctgttcggacgcctgcttgaccgattcggaggatttcttgacggtctccagcgtgctgtcgatgatcttggcagtggcgggcagcggcttgttggatggcttgggcgcgtacagatcctcctcgatgacggtggcgtagcgctgcaataccttgggacgcaccactttcatgctcggggtgagtgtgccgtgctcctgactgaattcctcatccagcaccgcgaatttgcgcacggactcagcgcgggagacattggcgttggcctggtcgatgtactgctggataaaggcgcgcaccgcgtcgttgtcgctggcctcggcgagtgtcatgtcggcattgaggccctgaccttccagccaggaatgcagcatttcggggtcgagctcgataagtgcggacacgaacggcttgccgtcgccgactactactgcatgagccacgatcgggcaggtgtcgatgacatcctccatcggggcggggctgatgttcttgccgccggcggtgatgatgatgtccttcttgcgtccggtaatgaaggtgaagccgcggtcgtcgatacgacccagatcgccggttttgatccagccgtcggcagtcatcgtctgtgcggtgagttcgggctgcttgtagtagccaaggaacacgttcgggccggtcagctcaatttcatcgtcttcgccaagacgcacgcccatgccaggcccaggcttgccgaccgaaccgacctcgttgtcgtcctcccaattgacgagcatcggagcggcggtttcggtcatgccataaccctggatgaaggtgatgtcattcatgccgttgaaaaagtgggccaaatccacgttgagcggcgcaccaccgcaggccagccatttgaggttcggtccgagagcggaacgaatggatttgcccaccgtggccatgtagaacgaatggcgcatgcgctcgatgaacgaatggccgcgaccggcctgctcatccttgctccacttgacgaagtgcttgaccgactgggcgaagatatgcccctggatgccggcaccagccttctgcgaggccgcgttatacaccttctcgaacacacgtggcacgcccagcaggtaggtgggcttgaaactgcggatatcggcgagcagtcgcttggcgtcgggaatgtatccgaccacgccgcagccaccgatgcacacgtactggatgtagcgggcgaagcagtgcgccagcggcaggaacagcagcagacggttgtcgtcgtacagcatgccacgcagaatctcgtagccgttaagcacgatgtgcgtgtaattgcggttggagagcatcgcgcccttgggcttgccggtggaaccggaggtgtagaccacggtgagcagatcatcggctttgatacgagcgatagccgcatccaacgtctcatcggatacgccatgcccgaagtcagcgacagcgtcaaggccatcggccttgaaattgaacacgtatttcatgcccggatgattgacacggatctgctcaagcgtctgtgcgcgctggaagtcgccggcaaaggcgatggcgggatcgacttcctcgacgatgcccgcggtctgacgggcggaatcggtctcatagacgggcacaaccacagcgccgattgccgcgcaagcgaaatcagccacaccccactcatagcaggtaggcgagtaaatcagcaccatggtgccggctttgacgccaagtcccaacaggcccttggccacctcgcgtacgcgggacagcatttcagtagctgtggcgctgcgccattggtgggtgttgtcatcctgccattccgcgatgatgtcatccggcgtgcgagctgctcgtttggacagcagcgagtagacggtgtcgtcatcggtggtgacatatctgggttcttctacatgttcacgcatggtcactactataggcgaaccagcctatgacacggcagaaccgtcttccgctaccagcgtaggaatcggtgtgcgggcggggccgtctggtcagcccaaatcggcatagatgcacatccatcgagaaccgatgtacttcagtttgaggttgactcgcagattttcctggccgatggtcatgaataccgccatttccagcgtgtccttgccggtgatcatgccgtcgatcaatgtggggacagtgggcagatagcagaatttcgctttgagctccggatgagtgaccatgtgggtgccgagcaggtattgcatggtttgcagccggtccaggcatggttttgtcatggctctgttgagatgtgcgacgctgagtttgccacgtatcgcgtccgccgatgtgcaggcgatgcggcatgcagccatggccatggaatgacattccttcgcattcagcccgcctatgaatgtgggttggatgtgataccgcaccgggcgatccgacagctccacaacgatgaatccgtcataactcggcaacggcccgtactgatatgtgccgtggaaaaatcccgaatactccatgatgacccccttcaagcccccttgcaactcaccatcatcggcgagcgtctgtactacaacatcacgaaaggcgcgccaagtcaaactacttgagcgcgccttcgggcaagttaagcctcctgcatggagggcaaacccccattttcagggggcaatcgggattatcgtgcggaatacgggttgaccaccatgccgcaacgctggaagttcttcacgtcgacgtagccggtggaggccatcgcgcgcttgagggcgccgatgaagttggtcttgccgtccgcctggtggctcggtccgaacagcacctgttcgagcgggccgaccgtgccgaccgtggtgcggtagccacgcggcagcgtctggtggcgggcttcggaaccccagtgggtgcccttgccgggggcctcggtggcgcgggccagcggcgcgccgagcatgaccgcgtcggcgccgagggccagggccttgacgaagctgccggagtcgcccatgccgccgtcggcgatgacctgcacgtagcggccgccggattcgtccatgtagtcgcggcgggcctcggccacgtcggcgatggcggtggccatcggggcctgcacgccgatggtctggcgggtggcggagaccgcgccgccgccgaagccgacgagcacgccggccgcgccggtgcgcatcaggtgcagggcagcggtgtagttggatgcgccgccgacgatgacaggcacgtcaaggtcgtagatgaacttcttgaggttcagcggttcctggccggaggagacgtgctcggcggagaccacagtgccgcggatcacgaacaggtccacgcccgcgtccaccacggtggagtagaactgctgggtgcgctgcggggagagcgcgccggccacggtgacaccggcggcgcgaatctcgtgcagacgttgcgtgatgagctccggcttgaccggctcggcatagatctgctggatacgctcggtggcctgatcggccggcagtccggcgatttcgtccaacagcggggtcggatcctcgtaacgggtccacagaccttccagatcgagcacgccgagcgcacccatcttgcccatggcgatggcggtggccgggctggtcaccgaatccatgggggcgccgatcaccggcacatcgaactcataggcgtcgatctgccaagaggtggagacgtcctcggggtcgcgggtgcgacgggaggggacgatcgccacatcgtcgagtgcgtagccgagacggccttttttgcccaaaccgatttcaatttcctgagacatggtttccagcctattgcccgggtgggacgccaacaaggccgtttcccacggaccggacgattgcttcaagtcgttacaaacatgcgctatgactaaatcatcttcacaccatctatcaggaggaagcatggccaaaatcaaggtcgaaggcactgtcgtcgaactcgacggcgacgagatgacccgcgtgatctggaaggacatcaaggatcgtctgatcctgccgtacctcgacgtgaacctcgactactacgatctgggcatcgagcaccgcgacgagaccgatgaccaggtgaccatcgacgccgcccacgccatccagaagcaccatgtcggtgtcaagtgcgccaccatcacccccgatgaggcccgagtcaaggaattcggtctcaagaagatgtggaagtcccccaacggcaccatccgcaacatcctgggcggcacgatcttccgcgagccgattgtgatgagcaacgtgcctcgtctggtgcccggctggaccaagccgatcgtcgtagcccgtcacgcattcggcgaccagtacaaggccaccgatttcaaggttccgggagccggccagctgaccgtcaccttcactccggacgatggctccgagccgattcagcacgtggtctacaactacggcgaagacggcggcgtggcccaggtgcagtacaacgtcaacgattcgatccgcggtttcgctcgcgcctgcttcaactacggcctgatgcgtcattacccggtgtacttgtccaccaagaacacgattttgaaggcctacgacggccagttcaaggacatctttgccgaggtgttcgagaccgaatacaaggacaggtacgccgaggccggcctgacttacgagcaccgcctgatcgacgacatggtggccagctccctgaagtggcacggcggttacatctgggcctgcaagaactacgatggcgatgtgcagtccgactccgtggcccagggcttcggttcgctgggcctcatgacctccgtgctcatgaccccggacggccagaccgtcgaggccgaagcggcgcacggcaccgtgacccgtcactaccgccgctggcagaagggcgagaagacctccaccaacccgatcgcatccatcttcgcgtggaccggcggccttaagcaccgcgccgatctggacggcacgcccgaagtccgtcacttcgccaagacgctggagaaggtcatcgtcgacaccgttgaaggcggtcagatgaccaaggatctggccatgctcatcggcccggacgaaccgtggctcgacaccgacggcttcatgaacgcgctggacgagaacctggccaaggctctggccgagtaaatcatcgaacacatcgtgcggacctacatgggtcatgtcatgtcgcaaactgtcatgattgtcgtgcttcatctggaatgttcctcagcacgataatcatgacagttgttcgatgcacgcacgtaatacctctaattgttcccggatatgtggcgatttgtccactggtccgggactttttcgtatacggcctactagaatcgtgattcagcttgttttcacgcccgcttgaggaggtttcgccgcttatggtgttcgcacgccgctcaaccaccctgctcgccgccattatcgcatcctgcgcgatggtgctgtcactgaccgcgtgcacctcagacaataagaccgttgtagatggtcaaaccacggtgacgtccaattctgccggcggcgtggccgtgttcacaccttcggacggcattacgctgaaccagcagacgccactgaacaaatgggcgaagctggtgcctgacctagccaaggctctggccgacgccggtttcaagaaaggcgatatcgatcatacgacgtccgactcgttggccaagcaaagccgcgccatccaagactttgtggtcgatcatctttcgaataacaccacggacgattccggcattgccatcgcgcccgacaacatgacattgctcgtggctccagtagtcgaggccgacgcttccactcgccaatacggcgattacatcagccagaacctgagcaccaacgatgccacggatggggaagctacttctgacggtgaatcttccgaagacgactcgtccaaagacgattcgtccaacactgagagcgacagcactgcatcggacgagcaggcgcaggccgtggaccggctggtctcatcgctcaagctggccaaggaatccggcatgcatgtggtattgctcggcaacagtatcgagggatataagccggacgccttcgtcaagttctcggacgcccagaccatcggcaagctacaggcggaaaagatggtgtccaaactcaagttggataaggccagtaaagacaaccccaaatacattgaggtgctgctgccatacaccgccgtggacgaaaaaggcaacgccaacgattccacgttcgcccaagaggcgttccgtggtatctggcaggtactgggctcctactatcagaagggcgttgtggaaagcccttcaggcaccttggacggcaaatccacggaaaacgattggcaagccgtggcctacgatgccgctaaggaaggctccactgcgaaagtgcttgacaagcgtctggcaaaaaccgacggacagtccacactcacccgtattgacggcatcatcacgatgaacgactacatcgcctccgaggtcgtcaaggaattggacgatctgggatacaccggctctgccgccgatatcaatccgcagatcaccatctcgggcattgtcggcaatatcaccggcaagaaggatctcagccgcgacgccgtgccggacccgatcaaatcccctgaaaacgacaacgcaaacgactcatccagttccgatgacgatgcggacgaggacacctccgcttccgacaaggaccgtgactcgcagtggcctctagtaaccggatacggcgcgtatgtctcgaacatcccatccatcgtcaatggcaagcaatggatgaccggcatggaagacagacagaccatcgccacggatatcgctcaggcctgcgccaagctcaacaaggacgaagcgctgaattccatgccttcaatcaggaactccgaggtaggcggcgtgaagaagatcccgaccatcagcgaaccgttgctggctgtcagcgccagcaatctcaagtccgcgctgatcgaccccggatatatttccttggccgatgccggtctgtgattcatactcgtcacgccgctagccgcctgcgatgtctcttccgtacggccctgttccggccgacaatcaccgttaaatcatgacggtttcagtacgatttttcgactccccgcatattgctgtggatcaagataatcggccgttcctcgcttgaggccccaatgcaggcaacggtcttcgcaatggtccgagctgccttcaacgatgcctacgggctgtctgcgggagatcgtatcccccactgagagctcggtaacggccggttcgaatgtcgacgtgacacctccacgatgccgtacactcaccacatctttgccagctactttgccagcaaaactcacggtccctgcctgcggtgacagaattacggtaccttgctccgcaacaagatccactccacgatgacctggtgcccacgggttgatcggccgctcgaactgttgttcgacctgtggatcgtcgaccggccagtcgaatcgggattcgcactgattgccattgcgccacgccaaatcagacatatcggtgaaatcctccaccgtgtatgccgcatctccggtcaccgcagtatccgcatgcgcaacatgctgaggcgtggatgccagccctactcccaaggcaagcagcaggccgataacggcggccaacgcgattatggcatccatacgccgttgccgttcctgagcccgctgacgcgcctgctgacgccgcctgctggcacgtcgggcttcgtcgcgacgccaatcaaacaacagtggtgcattcatgagattcctccccatagtgtgagtgtgatgcgattccggcttctttgccggtgatacccaccttgaggggtccgaaacaggatgtccagccagaacgacctatgtggttctagcttccgaagttatccacaatgaaatttcgcgtgacagtatcgccgcatcgtcatgttgttcgaccttcagccgcagccgatccatgtcacaaccgctgccatgcagtgacagcggaacatcagaactcttgtgattgttcccactgggttcgcatactcagacggttgttccgtttcaccgattccagtatttgccaagcagacaccagctcctctaccgttagtcgctagtgtatatccgtgttcggtttttggctgtatgagatagtattcgatgagtccgattctgcggaattcagcgcgacatgccctacacgcatgtaatttgctttttcgtggcaggcatgtaagatatgtgacttgtgcgcgagagaaatctcaaacacagcagacattcctgcgtagctcagttggcagagcatccgactgttaatcggacggtcactggttcaagcccagtcgcaggagctcacctgaacgggtaactccggtcgggatgaaaattgaatattcctgcgtagctcagttggcagagcatccgactgttaatcggacggtcactggttcaagcccagtcgcaggagctcacctgaacgggtaactccggtcgggatgaaaattgaatattcctgcgtagctcagttggcagagcatccgactgttaatcggacggtcactggttcaagcccagtcgcaggagccatcgaaagcctcggttctccgaggcttttttattttcatcgtattggtggccagacacgacaccccatcatcaaccgggaaatccatggcgaagacctcaccactactcacatcaggcagacaggtcactgtcaattcaccgatgagaggcacggtattcccagtatcagtttgggaataccgcgcaaatcttacatcgagaccttggtcaggggcatggcggagtcaatcgggaagtcgggggcgctgggggccacgccggcttcgaccaggttcacgccgagcatggcgaccatggcaccgttgtcggtgcagagcttgatttgcgggatacggacgtcgacgccgtagttctcgccgaattcgagcagtttggcgcgcagctgcgagttggcggagaagccgccgcccacgatcagcgtgttggaatcgtactgccggcagccgcgcatggccttacgggccagcacggtggccacggaatcggccagggatgcgcacacgtcgtccaccggaatctcatggccggcggcctgctcgctttccacccaacgggccacggcggtcttgacaccggagaaactgaaatcatacgggtgcgcggcaccggccttgccttgggtcagacccatcggcaccttgatggcgtgcgggtcgccgttctgaccatggcggtcgatgtgcgggccgcccggatacgggaagccgagcaggcgggcgaccttgtcgaagcactcccccgccgcgtcatccagcgtggtgcccaccacatcgattttgcgcggcatgtcttccacgtgcagcagcgaggtgtggccgccggagacgatcagagccagcgtgtccttggggaacgggccgaactgcagctgagtgacggcgatgtgcccgatcacatggttgatgccgtaaatcggcttgttcgcagcccaggccagcgccttggcgccggacacgcccacggccaggcaaccggccagtccgggaccggcggacacggcgatggcgtccacatccgccaacgtcatgttcgcgtcgacgagcgccttggacacgcatggcacgaaggcctcggcgtgcgcgcgggaggcgatttcggggatcacgccgccgtatcgcgcgtgttcctccatggatgaggccacgacgttggagagcagttcgcggccgcgtacgatggcggctgcggtttcgtcgcaggtggattcaatacccagtacaaccggttcgctcatcgtgcttctccgttcttctccgtttgcttgctggtaatgtcttcaatgtccgccgatgccgtctgcggggcggcaaagcccacgaccctcggcttcaggtccaagctcatggtgtatgcgtcgatgccttcgggctggtagtagcgtttgcgcaatcccatgcgttcgaatccgaaccgctgatacagggccagcgcagggtcgttatccacacgcacttcgagcagcatgcgcgaggcgccctgacgtttcgcctcgtcgaccagtgcctgaagcaacgcagcggcgatgccttgccgctggtatgccttgcccacgccgatggtcatgagctcggcgtcctcgccgtcataccagaagccggcgtagccgcggacaaccgcctgttccgcctcccccagcacatccagcagatacgtgcgggccggtgcgtccagttcctctcgcaccatgttcgcattccatgcgccgcggccgaacagttcgccttccaactgtgcaatggaacgaaccgcaagatcacgactcacagcagtgatgtcaacaatcatcggaccacaacccgcctcacgccttatcggcaccggcatagccgagcacgtgcttcagcgggttcggcacttcggcgtccggccggcgcaggtacaacggttcgatcggcacgacctggtcgccgcgcagttcgcagctcaacgcggtggtcgcaaagacggcgagcccggctttcccggcatccaataccgatccgtccaccacggagcccagcgcacgcagtccctgccagacggacgcgtatttggccgcgccgtggccggccacatccaccacatagctgacgccgtcgcgttcgccgtgttccgcgagcgccgcgttcacccgttcgacgatatgctccgggtagtcgatatccatctcgatccagcgtcgttcggcggcgtcctcgtccggcaggctgatgctgccgtggttgagcgagaagtacagctgcttgcggcgcgcatcgttgacgcacagcgtgacgtggcggtcgagttcgtgttccttggcctcggcgtccgggacgtcaccatccgattggcgcgaactcaagcgcggcacgtcggccaggaaatcgatgccgtcaaacatggcgctgtcacccagcacgaagctcatcatctcgccttgcgggtcgagtacgttctgtccgacgagcttggccccggtggcgaaggccaacgccttggcggccacgatgccggcgcgcaggccggtgaatggcgccgggccgatgcccacgacgatctcctcgatatcggcaggagtcaggccggcctcctcgaccgcgcgcgcgatattgacctgcagtttctccacatgggtgcgcgaatcggtctctacaatgggctcgcgccccacaatgccgaccgtcgagccgaatgaggtgtcaatcaccaacgtgcaacccatgaatcctcctagtcgtaaagcctctagagagtgtacatcgaggagtctatgggcgcatggcttattgcaggtcgaacgcggcccatcgcttgccgactgggacgaatgcgacggtacgagtgccgttgctggtgagttcgccgtctgatccagcggatgcgacatcggaggaatcgagaggtcgatcgatatggatttcaagtcgttctggtgccaaggcggtggccatttgttcgccccactccataagcaccaccgtgttctcgccggggtcttcaagttcttcgtccaatcccagcgattccagctcgtccagcaaacgcccgatggcgtcctgccccggcgcataggctgagccgcccagacggtaggcatccacatgcaccagatgagccggagtgccgtcggcgaaatgcccgtcaagttcgcgggcaatggtgaatgtaggagacacgatgggttcggtaatgtccagccccgccccgaagccttgggcgaatgtggttttgccggcaccaagagggcctgagagcagcaatacatcgccgccgtgtaccattccggccacgcggcggccgagctcctgcatggcctcgctggtgggagccgcaatagtgtgttcgctcataaatacccctttatcgacttttaccgacctttatgactgatgtcttcaatgcagcgttccagcgcatataccgggtcgccgccgttcgttttgctttgctcatccgcccaggcgagcatacggatgcaatgcgcgagtcctgccgaagtccagccgccaagttggcgcatcgcattcttcagcacccacggattggttttcgcttcggcctgtgaaatcgtgccggcccggaccgccgaggctttggcaatggtacggagcttcatggccaacgcgccgatcagcgcgatgggatcggtcccttgttccacagctgcacgcatcatgacgatggcttctgcggttttgccttccacggccttgtctgccacggcaaaaccggtgacctgcggattggcggtcaaatactggttgacacggtcgagccccatcggattatcgtcaaagtcgaaacacaattgctcgcacatggcggcgagttcgccggttttgccgccgagcacggataccagctgctgcgcggccatcggttcgactctacgaccgcgtttctcgaattctccgaatacgaaattgagttgggcatccggtttcttcaaatccggcacgtcctctttgcgagcgccggctttcaccagttggtcgatgatcttgcgccctttgacgccgccctcgtgctggcagatcaccacgctggagccgttcggatccttggcggcctgcttggtgtacgtcaccagagcttcggcgagcttttcgtcggcattctgcaggttgacgagtttgaccacggcaacgtcggaaagcaacgatgggctgacggcttcatcgaaggcatattggtcggccgatgtggcgtcgagctcgatgagttcggcgtcgggtcgcgccttcaacgcttgtgcgcacagtgccttggtgcgcgcgtcgttcaaatacgagtcgcctccgggcaccacggttaccggtacgttcgctgctgttttcgccatgcccccatctcgccacacaggttggacaatgacctgccggcataacggcccggcagctccctgcgattaggcgtatgcctcatccaacagggcgtcgatatccgcgaaacgcttgggaccgggacgccataccgggtgaccggccgcgatgaccagtgccgggtgttccaacgcgcgcaggtcgtccagcggattggcattcagcacaagcaaatcagcggatttgccgacttccaaagaaccggtctcggcatcgacgccgagaatggaggcgttgacggcagtgactgcgtgcagggcctcagccgggctgaaaccggcgtatgcgaccagcagctccagctcacgccatgtggcgtactgcggcacgaatgtcatgcctgtatcggtgccgacgcctatcatcaatccggcctcgtgcgcttgacgggcacctgaaaccatgccgccgaccacattcttggaattctccaattggatgtcggtgatgccggtcgcgtcctgtccaagcaaggtcaggggaaggccggcggaaagtgtcggaaccagcgccgagtatccgcgcaacgcattcggattgtgccggaacatgccgatcaattcgtcgtcgagcacgctgccgtgttcgatggtatcgacgccggccagcagcgaacgccgcacgccttccgggctttgcgcgtgcgcgccgacaataacaccgtactgatgcgcctcatcgcaaatcgcccgcatctgttccacgctcatctgcgggctgccggcctcgccgatttcctgtgcatcggttacgccgccggtcgcggcgattttgatggcgttgacgccagccttgagattctgcgcgactgcggtacgcgcctcttccggggtgccgctggtcagtgcgataagcggggcgccatggccttcgggaatcgccatcagcggtccggatgccaagatacgcggtccgaggatttggcctgcatcaatctgatcgcgtaatgtcacgacttcatatcccacgtcgccaagcgtgcggatcgtcgtaacgccggattccagcaatgttgtggcgttgtgtcttacggttgcggccatgtacggcttgcccaatggcgaatgcgcgaatgtggcgaccatacgttggcctttgggcgtcgccagcttcggattgagcggcttgccttgggagaacagatgggtatgcgcattgatcagccccggcatcacgattttgccggtgccgtcaagatagtggtattcggctgggatactggtttcgatgctgggtgcaacctgttcgatacgtccgtcggctccgaccacgatcgtcatgttacgcagtatggttccggctttatctccggtgacgatggtggcgtgggccaatgcgaatggttcgactatcggattatgagacaacatcatcgccggcactccttcatgcagctggttgaactggtctcaactgtatcgcagttttgccggctgatggtttatgccgcgcggcctatcgcataggttcggctggctattgcgatggttgctgcaccgaataccgcattggctattcggcttgccgccgcgtaaagagacgtctcgtctcctcgcaccagagactgaggcggacatgccaagcggaaccgaagcgcacgccaggcattccggcctcataacgacggacatgctggaggcaacggctgacgaacaccagtagcatgccgataccgatttccaccgccacaatcagcacggcacccgtaacgccgtctttccatgggatgacggccatcgtgctgccacccagccacaacgccacccgttccatcaccagcgtgccccatgacgatatccacgcgaatacgccggccagccatggctcgcaccatgcgcaggccaatgccatcaatcccgccatcgtggccaatcccacaaacggcgacaccaacaggttcgccggcacggacagcaacggcaactccggttccatcaacacctgaatcggcagggtgaacaactgcgcggccacggtcatcgccatcatttcggcgatgccgtgcggcatcgctcgctcaaaggcaccggccagccgccccgcaaacagcacgatacccagtacggcggccgaagacaaggcgaatccgtagctggccgacatatccggattcaccgccaatacaccgattaccgtccagcacagggcgctcaacgcttgcgtacgccgccccatcgcatacgtcaacgcacctatcaatcccatgatgaacgcgcgggtgaccgaatcactggggaacatcgccaatgccagcagcacatatactccagagaccagcaacgccgtcagccgccgatcaagcagcatccacatgcataaccggcgcaccaatcccgccaccagtacaaagtggccgccggatacggccatgaggtgcatgatgccggactggcggaactgattttccaacgtttgcgcatacgtgctgttgaccggcatcggaccggtctcgccgccgatataatcctggccaagcacacccatcgtcaatcccggcaccaacacacgcccctgatcggacaattgttcggtcacggtgaaaaacgcctcctgcacatgcgcaatcgcggcgagatgccacggcggagcccgcacctgtgctaccggctgttttccttccaagagcagccatagtggtatgcgtccatatcgcgcttgctgcaatacgcctgtcagcagatggaccgcgcctcgacgcaactgcccacaatacgattcgtcggcgtatacacgcacagcgaccgtggaacgtacatccgtaccatccacagtgatgccgctcagccgtatgtccgtctgacaatcgtatgtgcgttggtccgaagcgatcacgggcgtcgtcaccgtggccatgacttcgtggtatgaactcgattggcgagcttgtgcggaggcaggatcatgccaggcaatggtgtccgacgcgattgccgtcatactgccgatgcacgccaccgcaacgcatacggtcaatgttcccgtccaccggatccgcaggcggaaagacaccacgatcatcgccgccacggcagcacatgacgccactgttataggcaatattcgtgtgacaggccattccatgccgattatggtgacgtcaatgccagctccggcatcggcctttgcctgaccggtgccgagtccatcagacatcctccatgcgaataatgcgtgcgctcccagactcgccgcccacatcactatggcgatcggcagcatcctccaatcgcggctcccctgctcacgcagtatccaatccctgctcatccgaccgtcacctgccctcgcatggtctccaacgtcttggagccgatgcctttgacatccagcagctgatcgactgatgtatacccgccaatcgccgtgcgatgatcaatgatccgctgagcggtaaccggcccaatacctttgatggattgcaattcctcagcggtagccgtgttgaggttgatgagaccatgcgtggaagcgccggcatcgctgccgtccgtctgcatgtgcggagattgcgtggtatccgattcggggttcgctgtggcatcggaatgctccgactgctgcggatccgtgcgtttctcgtccgtggtgttctgcgatggcatcgtctgatctccagcggagccgcccgtggtctgcatggcggtcggttgagacagcatggccatattcatcgactgttggaccagcaatgccaagctgatgccaagggcgacgatcagcagcaatatcacggccaaggcatgcccaatggtgaacgacaatcgcggctgatcccgggtgagtctggctgattcgccgacggcatcggcggaacgtacgccaatcagatccgataacgcacgtttgtcacgggtcgcctgccgcaggccgctctgcgccctttggggcgggtggccggccggacggatccgtgcatggccgggaggcggcggaggcgtcgtgggccgttccactcgcggttggggcatggctgcgctctgcctgctgaatgcgcgcaaacggttggcggcatggtctgcgcgatggttacgagaaacgcccatgcatccacgctgatggattcatgggcgtttgtccagctgaaacggggtatgtggttctagcttatgaagttatccacaattgaggtgggcggttgacgctcccctcagtctcgctacgcgagccagctcccctcaaagaggggagctggctcgcaacaagtcactccgcgggaacgatggagacgatcttcggggccttgacgatcaccttgcgcggctccttgccgccaagacggtcggcgacggcggccagcgcctgcttctcgagatcggccggatcgatgtcgaccggcacttcgagcttggcgcgcaccttgcccttgatctgcaccacggcggtcacggtgtcgtggcccacgtagcgttcgtcggccaccggccacggctcggcggacagggattcggcgtgaccgagcttgctccacatctcctcgcagatgtgcggggcaatcggcgcgagcatcaggatcagcggctccacggcggcacgcggcacagccttcagaccggtcaggtggttgttgagcacgatgagcttggcgatggcggtgttcgggcgcatgccttccatttccgcggtcacttcggcaatcgtgttgttgagcagcttcagggtcttttcgtccggcgtgtcctcagtcacatgggcctggccggtggtctcatcgaccacattgcgccacagacgctgcaggaagcgcatgctaccgaccacgttgcgggtgttccacgggcgagactcgtccagcgggcccatgctcatttcgtacaggcggaaggtgtcggcaccgtagttctcgtacatgtagtccggggtcacgatgttcttgagggacttgcccatcttgccgaactcgcggttggcatgttcgccgttccaggtgaaggtcggctcgccggaggcgtcggccgggccttccacgacctcgtcggccggcacgtactggccacggtcgtcggtgtaggcgtaggcctggatcatgccctggttgaacagcttgtggaacggttcggccgagtccacgtagccgaggtcgaagagcaccttgtgccagaagcgggagtagagcaggtggagcacagcgtgttcgacgccgccgatgtacaggtccacaccgccttcatcacccgagtacttgttgtggttcgggcccatccagtagtcgaactcgtccttctccaccatgtgcttggtgtcggtcgggtcgatgtaacgcatgtagtaccagcaggagccggcccagttcggcatggtgttggtgtcgcggtagtaggtcttcttgccgtcgcccaagtcgagctcgaccttgacccagtcctcgttgcggctcaacggtgcctccgggttggactctgcgtccatcggatcgaaggtgcgcggctcatagtcgggcacgtcgggcaggttgatcggcaatgcggaatccggcagcaggtgcggggtgccgtcttcgccgtagacgatcgggaagggctcgccccagtagcgctggcgggagaacagccagtcgcgcagacggtagcttacggcgcccttgcccacgccggcggattcgagccaggcgttgaccttggcgatggcgtcgtccacgcgcaggccgttaaggctcagcgcgtcgcccttggcttcggtggcctcgacggaggagttgatcacgatgccgtcatgggagacgaacggcgccttgccctcatagttggccaagtcgtcgccggaatccggcagaggcgtgacggtgtagatgacaggcagaccgaacttcacggcaaagtcgtaatcgcgctggtcgccaccaggcacggccataatggcaccggtgccgtagtccatcagcacgtagtcggcagtaaacagcgggagcttcgcgccggtgatcgggttggtggcgtacaggccggtgaacagaccggtcttctcaccggcctcgttcacgcggtccttggaggtcttggcttcggcggccagacggtaggccttcaccgcctcgaccgggttggcatagccgcccttccagtcttcgggtacatcggccggccattcggcgggcacgttctccagcaggtgatgttccggggaaaccacggcgaacgtggtgccgaacagcgtgtcgggacgggtggtgtagatttccatgtccttgtcaccgtcggcagtggccacggtgaagtgcacggaggcaccatgggattcaccgatccagttgcgctgcatgagcttgaccttctcaggccagttgatgccgtcaagatcggcgatgaggcggtggccgtacttggtgatgcgcatggaccactggcgtagctcacgctggaagaccgggaagttgccacgctcggacttaccttcggcggtgacctcctcgttggccagcacggtgcccagacccgggcaccagttgaccggggacttggagatgtaggccaggcggaagtcgttcaagatatcctgctgctcggcgtcagtgaggtcggaccactgcttgccatcggactcgtggcccggaatggccttttcgccggattcgaacttggccacgagctcggcgatcgggcgtgcggagcccttggagccggacgggttggtggcgtcctcgtcgtaccaggaatcgtagatgcgcgagaagatccattgggtccagcgcacgtagccggggtcgatggtggcgaacgtacgacggttgtcgaagctcaggcccatacggtgcagctggcggctcatgttggcgatgttcgcctcagtggtcacgcgcgggtgctggccggtctggactgcgtactgttcggcaggcaggccgaaggcgtcgtaacccatggcgtgcaggacgttctcgcccttcatgcggtggtagcggctcaccacgtcggaggccaggtagcccagcgggtggccgacgtgcaggcctttgccggacgggtaggggaacatgtccatggcgaagtaggcggtgcggccttcggcgttacggcccttgccgtccttcaaatcgccgttgacgttggcggcccagaaggtgccttgctcgtcccaaatcttctgccacttgttttcgatgtcctgcgccagtgcggcgttgtagcggaagttgggctcttcggtttgcgtgctcttctcgttgtcactcataaatcagcaaggtagcctcgcaactggacacgtcgtcaatcgttattcagcatccgagacgatggctttggggtcgccgttcagcgaaaccgtgagctttgtttggcttgtgaacgtatccttggcggccgtccagctgccatcctcaaccatgtcttccaatgcttccgcgattttctgcgccaattggctggtgccttgactcacggcgatgccataaccgacctcgcccttgtccgcaatcacgtccatatactggggcccgttggccgcttgaagaccggaaagcaccgccatatcggaggctatggcatccgccgaccctacttgcacggccgtgacgcactgcgcataactgctgcgctcctgaatccgagcctgcgggtggttgccgcggaagatgccgactgcctcgtcacctttcactgcgcacaccgtgccgtcgcctacgtcacccaccgaacctgcgtcattggtgaatcggccacgctcatccgacctgaccagcaaaccgacgctggtcgtgaggtatggtccggcaaaatcaacgatcgcgctggacccatcggtgataggccaagaggcgacgaccatgtcgacctgtccattgtccagcatggagcgccggttttcggggcgaacctgtttgaagacgatctgcttgttcgcatagccgagtttggcggccacgtatttggcgatggtgatgtcgaagccctggtatgtgccgtcatgccatgctcccaccgatggctcgtcggctgcgaccccaatggcgatggtgggcccctccggcgctccggagacggtggtgacttgaatttggccgcaaccggccagaccggataatggcaatatcacgccaaaggccgcggcgaatcctgccatcagtcgggagcgaaatccgcgccgcatcggacggcgagcgcggagcatgctacggctggcgaacgatgaccagtggtgcataaccgtcaaacgccttacttgaacatgcgcgagcgtgtgaggaaccaggcaaccgcaccggagagcaccatggaaatcacgataatgagcatgaaaccccacggcttgtcagtgaacggcatacccatcatgccgccatcgaagttcatgccgtacatcgagaagatcagggtcgggatggacagtgtgatggagatgatggtgaagatgcgcatcacgttgttcaggttgttggacacgatcgaggcgaaagcgtcggtcatgttcgcaagaacgccgctgtaaatgttggccatctcgatagcctgcttgttttcggtgatgacgtcgtcgagcaggtcctcgtcgtccgggtattgcttgatgcgttgcagggtggtgagcttctccatcacgatttcgttcgatttcagcgatgtggtgaaatacaccaaagtcttgctcagctccatgagcatcacgatctcgcggttctgcatggagtggcgcagcttcagttcaagcttgtcgctttcgcggtcgatgatgcgcaggtaacgcaggtacatcgtggcgttgcggtacaggatctgcaggatgaagcgcgaacgcatgaaggtgttgaagcctcggatcgtgccttccatgaatgggtggagcacgggcgtgtcctgcatgcagacggtgatgatgaggttttcggtgacgatgatcgacagcgggatggtctcgtaccagtcgcgtccgccacgctcttccacggtgggaatgtcgacgatgatcatcgtgtaatcgtcttcgacgtctacacgtgaacgttcctcgtcatccaaaggggcacgcaggtcggccaggtcgatgccggtttgcgaggcgacggtggcgagctccacatcagtgggttcgctcaaacataaccaggagccgttttccggtttctcgatctgctccacttggccattgattgagctgaagattctcagcatgtcgtctcacccgccttccgcgctttcttactgttctatcgctgtacggttccaaaccgagattagtctagacccaccgttcgaatttgcgagcggggtttcgcatagcgaccatcaccagacgattggctgccaacttggcatgtgcggtcctcgcagatcggtcggcccgttctcccagtcggcgctgtcggcaatggcgggagccttgttgtattcctccaactcccacagtggctgttcggtgggggtgccgttgacgctgtggcgcactttaagccggcaccaacaggcgttgcgcatgccgccgagtgcgttcatgccgtccgggtcgagttcgagcaggttggagatggtggcggtaatccatgagccatgggtgacgagcatcagcgtggtgggcgtgctgtctgaataggcggagtcgatgaccagtgcgcgcacggcatcggcacctcgctggcccacggcggcacggctttccacaccatgcttggtttcgcccccagtgtgctgtttccaagaggcgtagtcgtcggctgccacggctttgatttcggcgcgggtcatgccttcccactcgccgaagctgcgttcacgcagtcgttggtcacaggtgactggcaatcccaaaatatcggcgaaggcgtgtgcggtctgttgggcacggaacaggtcggaggtcatcaccaccatgcgccggccggcggcgggagcctcctcgaactggcgcgtatcagtgcgttcggcggcgtcaggaccgggctgggcgatggcttcgggatgttcggcaagtcggttcaccttggcccagtaataccgtgaagcgagcgcgaatccggtctggtcgacctgccattggcctacgatgtcgagcggcacatcgatctggccttgcaagcgatgttcgagattgtattgcgtacggccatgacgcagcatcatcacttcatcgatcatcggttttcgccacctcgttctcttgcggtttgccatactcatctcagcacaacccctagaatggcggcatggagatttctgagtcgacttgggcgttcatcgccaaacaccgccgtgaagatgtgcgtgatgtggccttgcacgccaagcatgatggcgacgtggatgtgccgttcgcgctggagcaaattgccggctggcagcgcgcttcactcaagctacccgactgggcgtcccatgatgggctgattttcccgccgcaagtcccaatggaacaatgttccagccagttcaccgcacagtacaaggctcggctggcacagcgattgttggccgaagaggcagtcgacgacgactccccggcatccctagtcgatctgaccggcgggttcggcgtcgacttttcttacatgtcccgagtgtttgaccatgccatatatgtggaacaacaatccattttatgtggtatcgctcgccataatttcccgatactcggccttgaccacgccgaagtcatcaatgatgattcaacagcagtgcttgacacgcttggccgagtctccatgatcttcctcgatccggcccgccgtgacgatcatggctcgcgtacctacgcgattgccgattgcacgccggatgtgctgaccctgaaggatacgctgctggccaaggcaccgacggtcatggtcaagctctcccccatgctcgactggcataagaccgtcgccgatttcgccggcgcggtacatgaggtgcatatcgtctccaccgggaatgaatgcaaggaattgttgctggtgttggggcgcggccgttacgcctcaccgctcgtggtatgtgctaatgacgagcaggtgctgtcgtacaaggccggcgataacagcgacaatcacaccactatcagcgattctgccttggctgcacgcaatacctgtaataccgaggatttcccggctgaggaaagcacgaacgacttcgattcctcgcattggaagtacctttacgaacccaacgcctcaatcatgaaggccggatgctttgatgttctcgaacagcgcttcgccgtgcatcacatcagcccgaatagccacctgttcgtggcggccgaacctattgccgatttcccaggcagatcattcgtcatcgaatccatcgtcaccatgaacaagaaagaactgaagcagctattggccggtctcacgcacgccaacatcgccgtacgcaatttccccctaaccgtggcccagctgcgcaaaaaactcaaactcaaggacggcggcaacacctacctcttcgccaccaccgacctcaaaggccatcacctagtactgcgcactaaaaagcgaaaaagtggctccctctgacgaggaagccaccaatacgtcagctaatcagtccttggcgatggtcttgccggcggtcggaccggaggcaaggtcctggatctcggtgacttcgagaaccggaatcacggccggcttcttggtgcccttttcctcggcgaccttcacctgctcgttgtagatgtcgtcgtcaacgtgcagcaccacgttgccgcggaagcggtagccctgcttcttctcgaggttggcgaaagcgatgaccagcggagagccgttcttgaggttctcgtagtgctggccggcggtgcgctcgtggtaggcgatgtgcgtgtcgtccagcacgaacagggacatcttcgggccgagatccagttcgccgtccttggagacggtggtgatccagccgaggttgttcttgatgaattccttgatttccggagtaatgactgccatgtcgaatcctttcatgattgctatggacaacgtatttttactcttcccagagtaccggtttcgaacgcgactagcccggatgttcgctgtgaggaacctcaccttcgcacagctttcatccggttcttacctgcttggcgatgccgcgccccagccgcgcaccagccacacacctgtcacacacctgtcacacacccgacgcccatcgaccggtcgattttggccggtagttcccgtaatctgtgagccgagagagccacaagttttcctaactgtcctgaggtgcaccatgggtttgatcgaacgtttcaacaagctgcgcagccgctggtcccgcagctttcccccgaatctcgcccgactcatgttgctgggctgcgccgcattatggggtggcagctatctgctcgccaaattcgccatggaggcgattccgccccaatggctgatgggtctgcgcatgataggcgcctgcctgtgcatgctggccttgttccataagcacatcgtgccgtatctgacgccgaaaatcattgtgccggcgctcgtggtgggcctgacctactggggaacgatggtcacccagaccatcggcctgcagaccattgaaccgggccgcagcgcgttcctgacggccgcctactgcgtactcaccccgttcgccacgtggatcatttcgaaaacccgtccgaaggccatcaatctggtcgccggcgtgatctgtctgatcggcgtcggcttcgtctcgctgaagccgggcggttcgctgtctctgagcgccggcgactggctgaccatcgcaaccgccgtcatcttctcgttcaatctgacctgccttggtgtctacaccaaacgcttcgaccctatcgccgtcacttttgtgcagttcggcgttgccggcgtattgttcatcatcggcgcgttgttcaccgaacccatgccgaacgccagctggctggcaccctcagtagtggccagcgtgctctatctgttcctcggcgccacgatgagtgcccagatcatgcagaacatcggtctggctcacgtgcctgcctcgcaggcgtcaatcatcatgtgtacggaaagtctgttcgccgtcacgttttccgctttgttctggggcgagaggatcatgtggagctcactggtgggtttcgctttgattttcgccgccgtactgatgtcggtgatcagaccgaccgggcagtcgctgcatcgtaattgacgatgtcccgcggcctgcggcgacgcgaaacgcacgtgtgtgcgctgcagggcgtgtcggacctgtacgaaggccgattttgaaggtctcgtgtaggcctcgccccgcttccatcgagtctcaggcaacctgtcagcccgacaccctacggtcgtgcattgtgaagaagttttttgaaggaatctccctctcatccatcgtggcgggcacccttgccgccgtcacctcgttcctgctcgcatcgaagatcggcatcggcggttcggtgatcggagcggcggccagttacgtcgtctccgccgtggccaccaagatctaccagaacgtgctcaccgcctccggcgaaaaactccaatcggcctcgtcctccggcaacgggatcacgaaggacgccgagaacggcgatgccgatggcggcaccccccgaacggccggcagccggaccgacgttcgggacgagcccgatacggcgacgggcgtgaccgccgatgatgcttcctccacacgcagaccgcgtgaaatcgtgttcagccgagcgaacggcaggacgtactcggtcgatgagctgcgcaagtcccgcttccgcgcttcgaagcacaccgccatgatcgtcaccttggtgtccggcctgctcgccgtggcggtgacggccggcgtcgtgatgctggccacgcagggacgcggcacggacaatctcgtatcccccaccacgaccacgcccgcgcgcaacgacaccggcacgcgaacgggcacccccgatcagaacaacgctctgccccagacgggcaccggcgatgattcgaagggaaccagcaaggattcgaaaaccgacgccccctccaccgacctcgacgccaacggcacctcgggttcgaccggcgccggcgcctcggattcgaaaaccgacggcaccgccaacggttcgaacggcaccggcacctcaaagaatccgaccaccgaagacccgaccagccaaggcgtcggcggcagccagaccggttcgaacggcaccggcaccggctcgacgcaaaaagatccgtcggaatcgatttcaaccagcaccggcaccagcggcaccagcggatcgccggccaccggcccagacgcgggcctgtctcgttaagtgtgtaactggcgttttcattgttgtgttccctcgcttggccagcggtcggcgaaggtgatggcaaaggcgttgagcgcgggcttccggcgcgcgctccatcgtatccgtcccttgccggtggggtccagcgagcggacggtcaggtacatgcacttgagcgcggcctgctcgtcggggaagtggccgcgggcgcggatggagcgcttgaatctcgcgttgagcgattcgatggcgttggtcgtgcagatcacgcgccggatctccacgtcatagtccaggaacggtatgaaccgttcccacgcgtccatccacagcctgcggatcgcgggatatctcgcctcccacttgtccagcatcgggcgtcgcgggccgccgccgcggcggcggcgctcggcgcggtgtagatgggtttgacatcgcgtttgatggcgtcccagtccttcttcgacgcgtggcggaacgtgttgcgcagcagatgcaccacgcaggtctgcacgatggccagaggccataccgcgcccaccgcgtcgggcaggcctttgagcccgtcgcagatcaggaagaacacatcgtccacgccccggttcttcagctcggtgagcaccgacagccaatagcgcgcgccctccgcggcgggcgacgcccagatgcccagcacgtcgcggccgccctccagatccacgccaacggccacgtagaacgcgcggttggcgacctgcccgtcgcgcaccttgacgacggtcgcgtcgatgaacacggccgcgtacacacgatccaggggacgcgagcaccattcgtccttctcggccacgacccgctcggtgatgcgactgacggtctccctggacacgtccgccccgtagatctcctggaagtgggcgctgatctcgccggtggtcaggcccctggcatacagggacagcaccacctcgcccaccccgggcagccgccgctgccgtttcctgacgacgaccggctcgaacgagccatcgcggtctcgcggcacctcgatcccgaccggacctaccgaatcggtgaccacggtcttggcggtggtgccgttgcgcgtgttcgcggccctgccgtccttggatttcttgtgcttggcgcggcccaggtgctcggtcatctcctcgtccagggccgtctccagcacgcttttggtgaactgtttgagcagtccgtcgggccctgtcaggtccagtcctttttccttggccatgcgcacgaatgtgagcgccgcctcccgctcggcgttgcgtttttccgcgtccggcttcttcgtcggtgtcatgtttccccattgtcccagcagacatcgtccaccagcctttccgaccggccacacgaccggccagttaaggccagttacacacttcgagagacagtcccacgtataccggttctttgtttatgtaagggaatgattgatggttcggtttgcctgtttgtataatgcgcttatttatcttggtgccggatgtttttcggtctactatatggtggcctatcatgatgtgggcctgtcggtgctgctgatctccatcgtcaatgtggtgttcgacgtcagcgaatcggccagcgagctgcccacgtccgtgctgttcgaccggtggtcccgggaacggacgctgatcatcggcgtgttgtgccgcgtcgcgggattcatattgatgctgttctggtccgcgaacttcgccgtgctgtgcctggccaacgtgctggccggtatcggtgccgcggtcgaaagcggcgcggcgtcctcgctgtacatcgaatacgcccgcaagcacgatccctcgctgggtatgaagaccttggtgtcaagactgtcggcgatgatcggtgtgtgcacgatatgcggcggtgcggtcggtgccgtgctgttcctgcttgactcccagctgatctggctgggcgcgacggtgttctacgtattggcgatcatcccgcttctcggtctgatgagggccgggtcgcgcaccaaggccgcagcgacggatgggagcgggacgacggaacggcaggccgaggcgtccgtcgaatccgatggatccgccgagccgggcgagtccgggacctcgctgacggtgttggatcatgtcaggcagaccgtggcggccgcggccgtgctgctgcggaagccggagatatggaatatggtggtgttcaatctgggtacgttgtcggtgctgacgttctggcagctgctgctgatgggccaccagaccggggtctggtggcagttcgccggcctagtgttcactaatatcgcgcagatcgtcggcagtcgtctgggtatgctacggctgcatccacgttccggcgacattgcgatcctcgtgctcatcgtgtcggcggtggtgcttgcggccacgccgatgccggcggtgaggatcctggcgttcttcgtgttctcctgcgcgcagatgtacgtggcgaacacgatctccagcagcttgcacgagagcattgacgattcgatccgcgcgaccgcgttctccgtgggatcgctcgtattgatggccttcaccgcggtcgtcaccccgctgtgcggctacatcgccgacacgttctcgatttcctggggtacactgacgacgatccccctgctggtggccctcctcatcgccggacttgcgcgaaagcctgaatccgacaaacgggtaaaagtcgatatttcgttggattgagacgtcaagggcttgcggacacgatgtccgcaagcccttgacgtctatatgtcattcattcatggttggaatgcgctcctcctacgcgtgcggttgaatggttagtccatcgctatcgtcggagggtgtcagggccgaagatgaaaccgtctgttccgggtgcgtgatccaggtggaatggattggcaacggtgtacgacttgtcgccgggtttcacgtcgtccgtgtcgaattcgttggaatccttgtcgagcagtgggccgtccagcgaggcgggacagtacacggtgacgtgccagttgccgtcgtccatggggatgagcacggtgtagtgctggagaccgtctgctgcggcatcccttatggatgattccttgataaaggagtttcggggggggcgggtaacaaaaacccggaaccgaagttccgggtttttgtctggctcctgcggctgggcttgaaccagcgaccgtccgattaacagtcggatgctctgccaatagacaacgggcaattcgactgccatgtcaggtatggtaatctcgaaccagccagaagatcgataagccaaattacctgcgactgaagtgaggacggaatcatgcgtagcgagttccctggtctgttgtattgcgcgggtgcattaatcgcagtgacctcttgggctcttttcatgttctcgaaagaagtccatcggaaaggccgaacagtatccatcctgagattgcccgtcatttggatactgttcctcgtgagttcggcgccggctctcgcatcatatccggtttttgaaatatactcaggatctatggatccagatgtcctcgatttctacagtcagccgttcatacggctactgccagcagcgacctgcatagtgaatctgtgcgtatcggcatgctgctccatggctcttgtcagcaagcgcagaaaaaccgaacatcgaaaaatctgaaccacagcgttcgagatgagatgccatggaagaaccgctgtttccgctggccttggtgccgctggccgtcggattggtcctgatatacgtcgtgatcggatccaaaaaccgggaagagaacgcaaaaggactcttctgcgtgtcttctcggcgctcatggtcgttgccggcgcgttggccatcgcgagacaactcgcatgacgcttcacgctgcggctcggcttcccggctatcggtcgaagccagtccacgggccctctgtgccattccccgcaatcaaacagcaacgcccggtctcaagcccatgagacacttggaaccatggctaggattatcatgcgcacctcgcatgataatcctagccaactgttttttgctttattccaaggctttcgatttttgggaaacctaccgattaccctcgtttctccacgaggcacccacaggcacccaagaataatctcaactgattcccaccccaccggtcggccaccatcagccggaacgctcgtatctcgcggcgttggcgatctcgttcgcctgaagcgtcgggcatcgcgttgacgatccgctcgaccttctcgcgcaccatggcgtcgagcttgctctcgaacatggcctggtcgaactgtatgatttccttggacatggctccatgcctctttccaatcgcggtttttcattgtctggcgactgaaaatcgtacccggcacggcccatgtccttttccatcaaggccggaatccaaaaatgcgcaagaattcggtcgttaggggctgcggacgttttcttggagactgagcgaaaggtttctcgtatgttcagtcttgaggagcgttcgagggcggtggagctatacctcacaacgccgatgaccaccgcgcaggtggtggagtgcctgggctatccgaccagacagtgcctggaacgctggctggcgatggatccccggtatgctggccgtatggccaaacccataattcctctggagacaagacggaaggcgatcgaactggtgctgggcggcatgcagcagaagcaggccgccaaacagcttggcgtgagcgttggtgcggtgcacaactgggtcagggcgtaccgcaggggcggcatggccgcgttgcagccccggaaccagaatgccgcccagggcgggaaatcggcgtccgtccgtcctcggggcggggcggatgccgggggcggcgatgacgtggaggcgttgcgccgtagggtcgaggagctggagttggagaacgcgttgatgcgggaggtggtggaggtcgtaaaaaaagacccaggcgccgacctgcggcgcctgtcgaacagggagaagacgatgctgatcgaccggctgaggccgaggtattcgctgaggtcgatggcctgcttgctgcgcatagcgccgagcagctaccactaccaccatgccaggatcggcgttgacaagtacgccgggctgcgcgcccgcgtggcgcgggcgttcgccgactccaagggcaggtacgggtaccgtcgcgtcaaggccgcgctcgggacgggcgtctcggagaaggtgatccgcaggctcatggccgagggcgggctctcggcgcatgttcccaaacggcggcgttacagctcctacgagggggagaccacgcccgctcccggtaatctcgtcaaccgggacttcaccgccgaacggcccaatgagaagtggctcacggacatcaccgagatcaaggccagcgacgggaaggtgtacctctcgccgatgatcgactgccatgacggcaagatcgtcgcctacacggccggcttccatcccaacgcggagctcgccaaccggatgctcgccgaggcggcggagacgctgcccgacaacgcccgtcccgtggtccattccgaccggggatgccactaccggtggcccggatggctggagctcatggaacgctacgggctgacgcgctcaatgagcgcgaagggctgcagccccgacaacgccgccgcggagggattcttcggtcgcatgaagacggagtccgtctatcccgagcattgggagaaacgcacccgcgacgaggtgcttgtcctgatcgacgagtacatccactggtacaaccacgagcgcatcaaacagtcgctgggctggatgagtccggtacaatatcgtcaaagccaaggaatggctgcatgactatctccaagaaaacgtccgcagccccttatccccttagagactaaaggaattctattagttcagcaaattcgtatatcaatttattttttagcatgtcggacaatacagtaaatcaaccactctatggctaagataccaaggtagaaaagcgcccatacggaaaaactaatcagctttactcctagtgtctgtacagttccatgcccgtccactgttcttataaaaaggaatacactaatgcataagaacaatatgaattgaatgatttggaaaattctccaacctttgttttccacaatcaccctcctgtaaccccaatctctatatgctgattccaccattataagccgcccttggtgaaatgtcaggcgccccgttgtctaattgaaagtgcaacacccgttagattggagattgtccggataaccagtccgaagggatgttgcacctatgggagaagtatattcgcacctgtcggaagaggaacgccaggtcatccggatcgagatcggcaacggcaccagcatccgcaggatcggtctgatgctcggccgcaacgcctcgacggtcggcagggagatcgaacgcgacacgtggttcccgtccaacgagaacgagtcctgacggccgtaccggccgaaacggctgaagacgggcccgtggacgggcggatgctacatcgccggccccgccgcggcgcaaggccggccgcaggcgcgccgaaccgcgcaggcgctaccgcctgtcatgcgaacgcctgtgggcgcgggtggccgaatggctgggttgcggctggtcgccgctgctcatcggcggatggccgcgcgtcctgttccccgacgactccgccatgcgcgtgtgcccggagaccgtctgccgttggatccacgccgaccgccatcgccgtgaatgctgggcgcgctgccttccacgcggccacgggaggcgtcgcaggcgtggcggcgggaggacgtcgcgtttcccgattcccggacgggttcccatctccgagcgtccgccggaggccggagaccgcagcggtttcggccattgggaggccgacggcgtgatcggcgccggatgtaacccgcacaccgaggtcgagaggaagaccaggttcctcatggccgggatcgtgcccggcaagaccgccggggaaagcgtcggggcgcagccggcgatgttctcgccgctgccggccggcgcgcgcgtcagcgtcacgcacgacaacggcaccgggttcgcccgccacacgcgcctgcgcgacgggccgggcatggacacgtacttcgccgacccgtactccagccgacagcggggaagcaacgagaacaggaacggcatgatccgccggtatccgcccaaacgcagcgagatccggatggacatggccggggaactgcgggagattgtcgacgaggccgacaaccgtcccatgcgcgtgctggactaccggacacccgccgaggcattcgccgacgaactgctataattgcaggaccaacaggggtgttgcacctctaaatagacatcgggcgcttactgtggcgagaactggatctacagggccaacgtgacacaaattatcgaagaacacggcatctcagtcacggtccaacggcagaatgccggaaccgctcgccgcatcgttacccaatgcattggtctcaatcttggtggtcggctaccccatgcccctaatcacaacccgcattcctgcaatcaggcatcaccacccggtctcaagcccatgagacacttaagaccatgactaccatcatcatgcgcacctcgcatgataatcctagccaactgttttttgctttattccaaggttttcgatttttgggaaacctgccggttacgctcgttttccacgaggcacctacaggcacccaagaataatctcattcttctgtgcatatcagcggcttaccgacgacgaaagaagcatgcgagtgttcctgcgacctatctcagatggcgaagccgctcgatcagatcgacgagcgtctgttcctcctgttccacgcagtctaggaaaatggagcagaacgaatccggcttgccgtccacctgccatgcttccaggcctcgcgcgtatgaccgacccgcatcgtatttgatggccacgggacggtatccgttccgcagcagcacgaagttgagcagctggcggccggtccgcccgttgccgtccatgaatggatggatgttctcgaacatcgcgtggaaaccggcggccctgagtagcggatgcgctgcgcagccatccaacccgtcgatcaaggatcgcaggtcgtcgcggatctccagcgggtccgcggtcttgactcgggtggcggtgatccgcgccaaatagccataaggacggaacgtgccgcgggcgaacggctggagatccaatgcggtcacctcgtgtagacgacggatcagctcctcgttcagcttccgcccctccttggcatattcgcgcacgtaggccatgccgtcagcgacccctcgcgctgcgaacacgtatctggccggcgagtccgatgggacgaactcgccctccaacaccagcgacgtgtcctccagggtcagcgtggatccctcaatggcgttcgagttgtaggtgtagcgcaccagccagtcgcggtcgtaatccgccaacgccatgtcctcgacaccgtccaacggctccagcgagcgggcccggtccttcagcgcgtcgaccctccgcaggcgttcggaaatctcccgtcccccttcaagggcgttcagctcgtcgggaagggcctggatgtgccgtgacagctcgggattggccatcatgctcctcttttcgtgttccggttgcaaagtccattattccagtagtgactcgttgcgctagcggttcagatgacggctcaacgcatccggtccggttccgacgcttctggcatccccgtcccgttgtccaaggttcttccgcaacgtctcgccgaatctgtccatcaaatccgttttattgcgaatcgggtcagaaacacgaagggccttgccctccctgattctgcggatcgttccgatgcgcttcgtgagctggtcccggatggcgtcgaggcgttcgggcgcgaacatgcgcatgcgcgacaactcgtgcgccgcctcgtcgggccagtccgacagagcatccaggtcgaaccggctccaatcctccaccagtctgagctgccgcaaagccgagggcttgccggtcgcggtgtagaacggcttggcgaaccagtcgcggccgtccacatcgagctcgccgctccacaggctcgcgccagtgtcgtagatcggggccggacggaccgcaagggtctcgatgttccggatcagaccgaagttgctgtaatgcctatctgtattgcgcatgaggtagtcgaccacgagccaatcgtccgtggcgtcacgaaccgcccgttcgtctgcgccgaagccgacggcggcgcggatccactggtcatgcgagttgaggccgttgacggccttgacggattggagcacctgccaggcggagaccagctcctcatgattggagagcatgtccgcgcatgtggacaccagacggttgccgttgcgtgccagggaataccggacggccggaacgcccaatcgcatgcagagcctcgaggcgatgacctcgttcatcggctcctggccagtacggcccgacttgacgagcagtctcctgccggtggccctgtcgatcgtccagcgtttgggaagatcgccgccagtggacacgtcggggacgttgaggctgatgtcatgggacgacgagtacgaggtgagcaggatctcgcccagcgcctcgtcgaaggaattgtcgaagaagttgacgtccttccattcggccgggtcgtcctcgcgtctgacccagtactggtccgacaggctcagcccgtaggtcctgtcgagcagttcgtcggtcgatgccgcgccaagcgattcgagcacgcggcggatgccgtcgcgggtggaggggatggcgcgggacctccaccattcgtcgatcctcttggcatacagcgcgctcttgccgtgcgtggtgaactccaggggcagacgatcatggtcaaggacctcgccagaggagcacgcgcgaccggactcgggatcgtattcgaacacaaggaccggatggtccccgcacatgatcagcttgcgtggcatgattccgctccctccaaacttggtctttaaagattctacaggcacgaattacgcgcgagacggcgtcccgtttcatgacgcgatgcatggatatgggccacttccgcaaatcgcaagcctcggcgatgacgccgacaactgatacggtagtcatattggtttcccaaaggtaaagaggcatgaccatgggattgttcgacttcgctaagaactctttgggtgacgtgccgtccggcttcggcggtcggggcgatatcgccaaccatcttttcaacgaccgatgaaaaggctccggttgaaggctatggcatgatgacacgagcgtggggaatttatgaccgaaggatactcacataaagcggcacacatcgttgagcatatcattctcgcaatcgcgctgatctgggctggaggctgcactctcatatggatgcaaacggatatgtcgcatcgcatcgtgaacgcgaaatccgctgacggcacctgcgaagtgaccatcagcgaactcggctcgcccatattcttcggcccaagcagcatcacggtcaaagtctcttgggacaccgatcccggtgttatcggttccgagaacgtcacggaaatcaaaacggatctgcacaacgacggcaaatcattaggctcgggcaacttcaccgtcacctggcacggcaacatcccgaccgtcaccacccatggcgaggaacagccggaccaaagctacacattcaactggaaataaccgctccgaacatcatgtctctcccgagagtagtcctcacaaccgggcaggtcccacaaggagcatagctcatgcacccaccgcccggtctcaagcccatgagacacttaagaccatgactaccatcatcatgcatacctctgagggcgatatcaccatcaacctgttcgacgacaaggccccgaacaccgtggccaacttcctgggcctcgccaccggcgagaaggaatgggcggacccgtacaccggccagccttcccatggcaagttctacaacggcctgaccttccaccgtatcatcaagcagttcatgattcagggcggttgcccgctgggcaccggtaccggcggccctggctacgagttcgacgatgagatcgacccgagcctgaagttcgacaagccgtacctgttggctatggccaacgccggtctgcgtcgcggcatggacggtaaggtccatggcaccaatggctcccagttcttcatcaccaccgtgccgaccccgtggctggacggtcaccacaccatcttcggcgaggtcgccgatgacgactccaagaaggtcgtcgataagctcgaagcactggacaccgatccgatggatcgcccgctcgagccggccgtaattctgtccgtgaacgtggccgagtaagaccgacacatatacagcaaaggtcctgattggtattccagtcaggaccttttcgtattcttggctccctctctgaggggagctggcgccgcagacgtctgaggggagttccgcaagcccgcgctgctcccctcagtcagcttcgctgacagcccctcccggaggggagccaagcaacggcctacttcatcttgcgcagtcgaggttcggcggattccttggcaccggtgatgcggtacacgtcgaacacgccatcaatcttgcgcacggctgccagcaacgagttgagatgctgcggatcggccatttcgaagctgaactggctggtggccacgcgatcggaaccggtggcgatcgtaccggaaatgatgttcacgccatggtcggaaagcacacgtgtcacgtccgaaagcaggtttcgtcgatccagcgcctcgacctgaatcttgaccatgaacaggcccttggtgctggtccattcgacttcgaccacacgctcaggctgcttgtttttcagatcgatcatgttctggcagtcggtgcggtgcacggatacgccctgattacgggtgatgaagccgatgatattgtccccgggcaccggcatgcagcaacgggcgagtttgatccacacatcgcccacgcccttgactgataccccggtggagctgctggaggttttgcgttccatgggcttcagcggcaggacttcctgctcgacttcctcatcgacctcgtcggcacccgcatccttgaccagatgcgagatgacgttctgcgtggagacctgtccgtcgccaatggcggcgaacacggcgtccgcgttcgggaagttaaggtcgtcggccacacccaccaacgcttcgggcgtaagcaatgtgttgaccggcagattgcgcttgcgcatcgcgcgggtcagttcgtcgcggccctcctcgatggcttcggtacgacgctccttggagaaccactgacgaatcttgttgcgggccttcgggctcttgacgaagctcagccaatcgcgtgacgggccggctgtatcggatttggacgtcagaatttcgacggtatcgccattatcgagcgtggtgtcgagcggcaccagacgtccgttgacgcgcgcgcccatcgtacggtggcccacttcggtgtgcacggcgtacgcgaagtcgacgggcgtggcgtgagcgggcagggatacgattttgcctttcggcgtgaacacgtagacttcggacgagccaaggtcttccttgagcgagcccagaaactcattggaatcgggggtttcgctggtccagtcggcgagctgctgaatccatttgagattgtcggcttcggaaagctcctggttcttctcgtcacgcctgcggtcggacttgtccggcgagctcaaggcgcggccggcctggccgttttccttgtatttccagtgcgcggcgatgccgaattcggcgcggcggtgcatgtcccaggtgcgaatctggatttcgaccggcttgccaccggggcccaccaccgtggtgtgcagcgactggtacatgttgagcttcggcatggcgatgtagtccttgaatcggccgggaaccgggttccaccgcgcatgcacggcaccgagcgccgcatagcaatcctgaatggtgtcgacgatgatgcgcacgccgaccagatcgtagatgttcgcgaaatcatggccgcgcacgatcatcttctggtagatggagaagtagtccttcgggcgtccggtgacgtatgccttgatgttctgctcgtcgagatcctcgttgatctccgccagaatctgcttcaggtacacatcgcgctggccggctcggcgagccaccagcaccacgatctcgttgtagatcttcgggtagagcaccttgaagctcagttcctcgagctccgtcttgatggcgttcataccgagtcggttggccaaaggtgcgtacacgtcaagggtttcacgcgccttcttctgggcggacgtggtcttcacatagcgccaggtgcgagcgttgtgtacgcggtcggcgagcttgaccaccaaggtacgcacgtcgcggctcatggccaccacgagtttgcgaatggtttcggcttgggcggaatcacccacttcaagctgactcagcttggtaacgccatcgaccagaccggccacggtgtcgccgaattcggcgcggcattgatccaacgtatagtcggtgtcttccaccgtgtcgtgcaacaggccggctgccaccacgatcgggcccatgcccagatccgcgagaatctgggaaacggccagcgggtggatgatgtacggctcgccagacttgcggcgctgggcggagtgctggatgacggcacgccggtaggcacggtcaagaatggacaaatcctcatcggggtgatgggacttgcacaccttcttgattggatccagcggattgagcggatcggcactgatctcacaacccaacttacgggcggcgtactgctcgccatcaatctctgccatgccagtcacctccctcgtcatgaagttcattgtagccgcgaaccggagccttgtgcattcacctgttcgccatcattggttccacaaccgttgttgccgtcatcaccttagtcattcaaccggcctaatccggtcaggacgccactcccgtcgaaccgaacccgcgttcggcgcgatcggatccgggcagtgtctcggccgggatgaaccgagcctcaacataccgctgaatcaccaattgagcgatgcgatcgcccggatggaagacggcggtgtgcttcggatcgaggttgatcagaggcaccttgatctcgccacggtagccggcatcaacggtgccaggcgcgttgagcacggtgacgccctgcttggcggccagcccggaacgcggatgcaccaacgccacgtagcccgcaggtagggcgatggccacgccggtgggaaccagtgcccgttcaaaaggcttcagcgtcacatcgacggtggtgatgaggtcggcaccggcatcgcccgcgtgggcatagtgcagctgggccggatgttcggggtcgaggcttttgaccaggacctcggtggattcgggctcgttgtaggtctcgttgaacgccatcaggcggcgcactcctcacacaccggctggccatcctcgtccgtgtaggcgagctggctgcgatgcttgaccagaaagcactgcgagcagatgaactcgtcaccctgcatggggatgacggtcaccgaggaatcctcgttgctcaaatcggcgcccggcagttcgtagtcttcggcgatggcgttctcatcgtcgtcgatgtcgctcgaggcgttctgcgaggacttccccagcgcctgcagcgattcctcgtcctcatccttgttgcggggggaatcataatcctgagccatcatggtcctttcgtcgtctttggttcgtaagtcgatatatatagcacggtcagcgccgtactcgcccataggatacacgatttgaaatactcgtaaagttcgacacgtggggcatacttaaaagaagtaatgtctttgcgacggaaagtggtgcgaatatgccagatgatcggcttgaaaaagcccgtttcgtgcgcgtgagcaagacgggggacctcgtattctcccttggcggcagggaaatggctgtgagcgtggacgacacgctcgaacgggcgattcttgaggccaagcaggtcagaagcgagatgcgacaggctccccagccgcatcagcagtccactttgccgatttcccagatacagtcgctgattcgcgccggtgccgatccggcccgtgtcgcggagaaatatcatctgagcgaaatgctggtacgtcgtttctccatggctgtggagaccgagaaacagtatgccatcgaacagttccttgccgtggcggcacccaaagacagcagggtgcgcaccatcagcgaactggtggaacgcacgctggcctctgcgggaatcggcatggaatcagtgacctggaaatccacccgacgtggacttgagccttggcgcatcgtggcgatattcacttccgcgggccgtgagatccatgccgaatggacgtggaatatgcacgacaattccgtgatgagcctgaacaatgccgctcgaaaactgctcggcgaacagaatccggaatcagccacggattccaaactcaagccgacgattcccgaactgcccggcgactccgtacgctccgcgcgtatcgagcgcgccgtgtctgcttgggcggctcctacgccttcgattccggccgcacggcctgccgcaatccggccctctgtcacttccacaggttccatgcccccagtggatctatccacgtccatctcaccggccacgacccaggctcatggcactacggcccccagtccggtctcttcgcagaccgccgggtctgtttcgccatctgccgcaggattacagcaatcgcctgccacggcaccagagcagggctctgacaatgtttcggacaagaccatacggagtggccccaatgcgcagctagtagccaccgagcaggagcgggcggccgaatccgccgccaccgaacatgaggcaccagccaaaccggccaagcgtaaatcaggacgttcggccgtaccaagctgggacgagattctgttcggagactgaatttccgaatcaggccatatcgatcaggcagggaatatccatttccaatgctgtttgggagccatgcacgctcggcaggtgggtggccttgtctccttgcgtacgcgaatcgacgagggtcacggctcccgctgcctgcacgaccacatcgccgagcattggccggactcgctcgcagaccggtccaaacaatccgtccgcgatggcctcatccttggtccgcaccaaggctcggtcttgcagacaatcgcgccaccggcaagctatatcctcaggtcgttcatccggctcggcatacagcatcagcgagcgcggctcccccccgaccagtgacacgcctcgggtgagctgcggttcaacggcgatgtcaatccgctggtccatgtcggtttgcaccatgccgtggtcggctacgatgacgatcagcgtgcctttgggtgcgctgcgtttcaggagcgcgagctgggcgtcgatatgttcgaatgcggccacccagtgttcggaatcccacccgtaattgtggccgactttgtcggcgtcacggatgtacaggtaggtcaggccgggggtgcgggaggcgcgtgcggcggccagcacacgatcgcgtggggtgacgttgccttgatagtcggtgcctcgcaatgcggcttcggtcaatggcgatttggagaacttgggcaaccccgagctcgtgacgcgcacctcttgagccgcaagtttctcgaacaccgtctcctcgcgctgcaggtcgagcggatcgaccatgggcggcacaggaatgtgcggattggctggtttgggtgccagcgcgtctttgaactggatgagttggatgagcttatggctggcgggttcgagctgcgtatagcccgccattgcggtcagtcccgggcaggttccggtaccgaatgcggccatggccgccacagtggtgcttggagcgcaggtagcgatgggacgctgattggcgctttcgttcatcagcgaacgcagatagggcgcgtggccgaggcgcatggcgaggttccagtagcccaggccgtccacgagcaccacgatggccgattcggcatcgggcagccccaacgcgcgctggcatgccttgggatcggcgtggaccttggtgggggccggatgtccgatggcggcggacaaggcgggcagcacggcggacaggtgcagtgctcccccacgccgatcggccggggcgtcatccccatagcccactgtgggcaccagccgcagcaactcgtccatatccggcgtctcaacactcatagttgcccattcaagtagcacccctccccttggctcagtgcgcagagaacggttctcaataacaactgtgcgctccaacgcacataatcaaacaaacgcacatcgactgaaacactggaatcacgccgttttatcggcaaacatgtgcgattggcgcaccgaaaccagcgcacagttgttatcgagaaccgttctctgcgcactgtttcgcgccctcccgctaatatgggggcgttcgaaagggagtttcatggcatcacaccgcaaaccgtccgcgcaaacctatgatccgcgcacggtcaaggagcatatcgtcgagacgccgctgaacgaggagatgagcaagtccttcctcgagtatgcgtattcggtgatttacgcacgcgcactgcccgatgcgcgcgatggcttgaagccggtgcagcgccgcatcgtctaccagatgggcgagatgaatctgactcccgaccgcccgtatatgaagtccgcccgcgtggtgggcgaggtgatgggcaagctccacccgcacggtgattccgcgatctacgaggccatggtgcgtttggcacagccgttcgcgatgcgtctgccgctggtagacggccacggcaacttcggctcgctggatgacggccctgcggcctcccgttacaccgaggccaggcttggcccggccgctctcggcatgaacgcggatatcgatgaggacaccgtcgacttcacgccgaactatgacaacaagctcaaggaaccgaccgtgctgccggccgccatcccgaatctgctggtcaacggcggctcgggcatcgccgtgggcatggccacgaacctggccacccacaatctgggcgaggtggtaaacgccgccaagttcctcatggcgcattcggacgccaccctggaacagctgatgcgttacgtgcccggccccgactggcccaccggcggcacgatcatcggccgcgacggcatccgtgaggcctatgccactggccgtggtacgctcaccacgcgcgccgccacgcatatcgagcatgtcacggcccgcaagcaggccatcgtggtcaccgagctgccgtacatggtgggcccggagaaggtaatcgaacgtatttccgacggtgtgaagaaccgcaagctggaggggatttccggcgcgttcgatctgaccgatcgtcataacggcacgcgtatcgtcatcgagatcaagactggtttcgacccgcatgcggttctggtgcagttgttcaagcacacaccgttgcaagacaacttcgccatgaacaacgtggcgttggtggagggccgcccgcacacgatgggtctgaaggagatgcttcaggtgtgggtggaccaccgccgtgtggtgattcgccgccgcagtgaatatcgcaagaagaaggcgctggagcgcctgcacctggtcgagggcctgctgctggccatgttggacatcgacgaggtgattcaggtaatccgcacctcggatgatgcggatgccgcgaagagccgtttgatggtcgttttcgatttggacgaggtccaggctcagtacatcctcgacctgcgtctgcgccgactgaccaagatgaaccgtatcgagcttgaggccgaacgcgatgatctgaagaagcgtatcgaggagctgacccggatcctggcctccgccgaggcgctcgaccaggtggtcaccgacgagatggacgaagcggtcgccaagtggggctcgccgcgccgtaccgtgctgctggatgccgacccggatggcacgttgacgccggtcgtggcgcagggtgccggggcttcgggcgtgtccaagtccgcgctcgaagcggtgaaggccgccactacgatctcctccgccgaagccgatgtggccgcagccgcagctgcggccaagaagaccggcgaacagtccacgctgaccggagccttgaagatcgaggacgagccgtgcgtggtgatgatgagcgctaccggtttgattgcccgtaccacgccaagcgcgatggacgtgttcaatgcacgatccacttccgatgagcgtttgagagacgatcagatcaccacaatcttcgagacttccacgcgcgctacgtatgggctggtcacgtcggccggccgcctggtgctcgcgcatgtggttgatttgcctgccttgcccgctaccgccacattgtcgctgaagggaggagttcaggccgacgaactgatcggcatgaccgaatccaccgatccgattcgcggtgagcgtgtgattacggcgattgccatggagcagccgacgtccggcaagaccagtgccaaggacgagagcgaggatggcggggccgccgaggccaagccgttgccgtcgctggctatcggtacccgtaacggtgtcatcaagcgttggaatcgtgaggcacccaccaccatggattcttggcccgtcattgatctgaaagatggcgacgaagtggtattcgccgccgtggccgaggatgacgaccgtctggtgttcatctcctccgattcctcgctactgacctttgaggcgaagaacgtgcgcccgcagggtcgtactgcgggcggtatggccggcatcaagctggccgagggcgcccgtgtggcggccttcaacgtggttcccgccggcaaggtggcatggacctatgaagagggtgagaacggcttgacttccggatccggtgcagtggtgctcaccgtggccggcgattccgatgcactgcccggcaccgaaaacggcgcggcgaaggtcactccgctggaaatgtaccccaccaagggtcgcgctaccggcggcgtgcgttcccagcgattcctgaagggccagaacacgctgattcttgcctgggtgggcctctacccgttgcacgcctctacatccgcaggctctccggtcgagcttcccaagcccgatatgcgccgagacggttccggagtagacctcgcctcccccatcgccttcattgcgtaacctcaattaagctccctctgatgggccgagccgtaaagcaaacaccccagtggggtgtttgtaggcgaggagcgaacgatagtgagccaaacaatagagaagagaccctaaacccggcctacactaagcattaaggaggtggcgatgagactactggttgccgtatccaatgaaccgttggcccacgccattcatggtgccctgcttgccggtcgtcatgaggtgtctttggcaagcaccggtagtatcgcgctcgccgctgtcgccaaggagtcatttgacgcagtgattcttgatgaatccctgctcggcatttccaccgagcagctcatcgaatccttacgcaatgcccgtgcctccgtcaagattctgctgctgacttcgacgccactcagcaaaaccattggtgaaggcagccgctggcgagcgctgcctgacgagtacgcccctatcgaagagacgccctacagctccttcagcgcgaattcacgcgcaaacaactcagatgccgaagccgaacaacgctcggacaatgctgcctctagcgcacaagctaacgtacgacgcccagatgccgcgctgagcaaaccattctccgatggcgaactgctctcatacgtcggctcgcttgccaccgactcccccgccatgatcattcgtggcaatctcacgttggacaccacgaatcacaaggcctactacgcatccactcacagcgcaatctcactgtcccgtctggaatacagtttgcttgaagcgctggtcaaggctgatggccagttcgtcaacaccagcgagttggtcaaacttatcggcggcccattcttcgagcaacagggcttactcaagaacgccctctacacactggataagaagctcacccgcgccggcctcatcatgacccaacgaggctccaactaccgcattcgatagctgggctcaatcagtacagccgcatgccttggggaacgggggtgaagccggactggtggaggatgcgggcgaaggggtgacgggcgttgaggggttcgccattgatgtcgctgaatgtcacggagccggtgccattgcgtttgagggcgtaggccagttctgtggcggccttgcgcatttgttcgtcggaatcattgacagcggcttcatggccgaccgattgatcgaacgctgtcaggtgcttggctttggcggccgcgtatagtagcgcgccttgcgcattgagcacgaccgtggctccgatacggcgtgccggtttacccgcaccggcaggcgcgtccggccacgcgatggcggagccactgagatttgcggggtcgagcacactcaatgccaccacggactggccacgatgctctgacggatgacgcaacgcatccacggtgtcgcgctcggcaaattgggccgcgccgaaaccacggacgaacatgcctcgtaccagtcgaccatgctcctccatgcgattcaataccggatacaacgctgagtagccacccgggatattttccttgtcaatcaccggctgcgcgatgacgccatacctgtccagcaacgtctcgaccagtgcgagtgcccgttcggtctggtcggtgtcttcggcttcagcttgcccgattacggcggaccacaaacctcctaacgtcatatccgtagtggctcggcgaatcggagcgacacgcccacgacgacgtgatgtagtggatttacgcgggcttgctgcgcctgcggttaatgcacgcaccggcgcgaagctggaattggtgaccttaccttgccagaccaagctccacaaggcatccttgaactgctgttcgctccactcttgcggaatgatttcgccggtgtttggattgatgtccggctccgaggtctcattccacgcacgtttggcggcatccatcagtttacgggcatggaacgctccccctgagtccagtgcggtcagaatcgcttccggcatggtggcgtctgaggcgttcgatgtcgtaccatgttccacaccgctgaacaatattgaatccgccggatagaaagcaacctcaccggggtccatcgcactggttcccccggtttttgagccgacccagaccacatcgccgctggtcagcaactcatccagcaatgcaggttggtagtctcgtactcgtgcggggaatactgccgactcccagagtgcagtgggcagtgatatgccctccagctgctcgataacgcgcatgagcccgtcagcaccttcatatcgttcgccgccgaccggcccgataccttgtcggtcgataagaaacatctggaacgcctctggttctactggcttgactgctttacgcgccttggccaatgagcgagaccgaatacggcggaatacgtccttatggagccactgttggccttgctcgtcatcatctacaaagtggccttgcagcaactcgcctttggcagccagcacatccagagtgtgcacggcatccgtagcatcgaggtgtagatcggctatgagctgatcggcggtgaaaggaccatgggttttggcgtaacgggtcacgcgaccagtcacatcatcgtcggcaagctcattccagaaagtgtgctcccccagttcctgttcgacttcgcgaatcacgtccgggttgagcacttgtgccatatcggtggtgccgagcaagcgttcgagcacgtgcggatcgagagacagcagttgcgcgctacgctcggcctgaggttggtcatactggtacatcaccacgccgacgaagccaaagagaatgttctcggcgaaaggcgatggcgactcggtttccacgtccttcacggtaatggtgccggcttgcaatccggtcatcacctcgttcagggcgggcatgtcgtatacgtcttgcaaacattcgcgcgcggtttccagcagcagcggaaagttcttggccatacgtgcggattgcaggagctgtgcggcgcgcagtcgctgctgccataggggcacgcgacggcccgggtcggatcgcggcatgaacagtgatcgggcggcgcattcgcggaatcgtgcggcaaatagcacggactcgcccacttgacgctctacatctgctttgaggtcttctgggtcgaaaaggaacaggtcttgagcaggaatatgtccgtcaccgtccggtagctgaatgacgataccgtcatcggcggcatatacctgcccgtcgaaaccgtagcgttggcgcagtctgcggctgatggccatggaccacggttcgtgaacgcggcggccgaaggggcttaacagcacgatgcgccatccgccgtcttcatcgcgtgtgcgctccacgataagggtttggtcgctggggactgcaccagtggcggcttgttgctcggagagtaggcgggccaagttggtgatggcgttggcatctaggccatcgtggtggagacgggtgaggattgttgggatgaaggttgggacagctggaccttctgcggcagacctcccctcagtccgcttcacgtctaatccggcggcgatttctcgggtgaagcgggctatggtacggctgaaaccgtagtcacggccagcgccttcaccgtgccagaacggcaggcgggcggtgcggcccggagccggagtcacgaccacacgatcacgggtgatttcctgaatctgccatgtggaggtgccgagcgtaatgacatcgcccacgcgcgattcgtagaccatctcctcatccaactcgccgacgcgacgctggcctttgccggcgtccgcctcaggcaggaccacggtgtacagccctcgatcgggaatcgtaccgccagaggtaacggccactttctgcgaaccgggacgggcggaaatcaggccattatcccgattccataccagtcgcggccgaaaggccgagaattcctcgctgttgtattcgccggacatcatgccgattaccgcatcgaacatgtcacgtggcagttcggcaaacggcgcagcacggcgcaccgtggcataccagtcatcagcgttcaaatcgtgcatcgcggcagcggccacggtctgctgggcgagaatatcgagcggattgcgcggcacggccaatggttctatatcgccggcaatcatggcttccagacttgcggccccagtgacaatctgctgacgggtgagcgggtagaacaatgcgtgagagacgccaccgacctgatgatcggcacggcctacacgctgcaatccggaggagaccgacaacggcgtatcgacttgaatcaccaagtcgaccgagcccatatcaatgccgagctccaaactggaggtggccaccacgcaacgcaattcaccacgtttaagccgttcctcaatcattttgcgacggtctttggaaaccgacccatgatgagccatggcgatgacatcatcgccctcatgtgagccgacaagcatggtggtggagccgaccacagcatcgtaatgcgtggagaacccttcgcggccttccggagagcccagatcccgcacagtgtcgggattggtgtcatgccgggtctgcgcatacagatcgttcaagcgcgcagtgagtttctcagccacaccacgcgaattaacgaacaccaatgtagtgcggtgcgcgagaatctcatccaaaatactgcgttccaccacgggccaaatggaaccggaggtacggtcgcccgccgctccaaccaacgcggaggaatcgaacgcatcactcgcatcagaatcgtccccagaagtggaagaaacatctctatcatccaccggcacaatgcccctgcgttcagcaagtcgctgcatggccggcgtgacaccactgatatgcggagcggaccgttcagcatccacgccaccgacacgctgcttggcattcacggactgcaaatcacgcatgttttccaacggctcaatcatgcgcaaatccattgcaggccgcccaccgggattcacgatggtaaccggttgcccgccgcccaggaatcgcgccgccttttcaggcggattcaccgtagcggatagaccaatgcgctgcatatgacgatcgccgcggccagcatcgatggcggcatcaccgccctcatcagcatctgcatcgattgcatctcgcttgcgcgattctgcgacaaggttctccagccgttcaaggcttaccgccaaatgtgcgccgcgcttggtgcccgccactgcatgaatctcatcgacgatcaccgtatcgacagtgccgagaatccgccctgccttcgaagtgagcaacaagtacaacgattctggcgtggtaacgaggatatccggtggatgggaggctatgcgccgccgctcctgtgcggtggtgtcgcctgaacgagtggcgaccgcgatcttcggcacgggcagcccttgcgcctcgcattgtgcagcaatgccctccaaaggctgttctaggttcttggccacatcggccgcgagcgcctttaacggcgagatatacagcacacgcacaccggcacgccgcgtgcgtggcacggtcatcaatcggtcgatggctgagagaaacgcggccaatgttttgccggagccggtaggggcgatgaccaagacattgcgaccggaatggattgccggccatgcctgagcctgtgcctcggtcggctgaccgaaggcatgctcgaaccagatcttggtgggttcggaaaacaggctcaggctttcgtacatatgtacgattataggtcagctgaagtaggcgatgacttcttcggcggtaccgtaggcactttgggcaccgagcttggtggccgcataggcggagacgtaggagccgatttgcgcggattgcagcagcgtatgaccggcggccaagccagccagcacggtccccatgaacgagtcgccgcaaccggtggtgtccactgcattgacttgcgcggcggatacgcgatgccaacgtccgttctcgatcaccaccgatcccgacgcaccaagcgtcgctatcgcccggtcgaatccgtaatcggtgaatcgttcggcgacctcgtaccagtcgagtgattccacgtcatcatccggcaggcccagcagttgagccacttcatgctggttgaccagcagaatatccgtggcttccaccagttcgtgaggcagctcgtccataaatggcgagtcgttgagcagcacggtcacgccagcgtcatgcgcggtctgcgcggcggcgataacggtggcaatcgggctctccaaacacagtcccaataccgcgcattcggcgatggtcgtgcgatgtgattgcacatagccggcacttgccttggcattggaacccggcgaatagacgatggtgttctcgccctcagcgctcacggtgattaccgtggtgccgctggggccttcgacatgcaggatatcggcggtgtcgacgccggcctcatccagcttgcttaataggaagtccgcgttggagtcctcgcccaccgcgcccagcaactggacattgacaccgagacgagcggcggcagacgcctgattcgcgcccttgccgcccggcagcactttcatggcaccaccattgacggtttcacctggcttgggtagtcgtttagtggttacggtgtaatcggcgttcatcgagccgaccacgattaccgagcccggcgcatccttcagcgcttccaatcgttcccgtacgggctcgggcatctgttcatgttcttcttcacttatcaccatgggctccaagcatagtaggcgtcgggcccaaatacgcatatgatcagccgcgcaacttgcgaagacgctcgtgcatggccaccatcagcaccaagagcaccagcaaataccacgggtagagactgattgtcgcatattgcgcgatgatgccgaacagtggcggcatgagcagtgagcccacataggcgcaggccatctgcacgccgacgatggcctgcgatttgtcttcgccgaagtaggccggcgtcgagtggatgacgcacggataaatcggcgcgcacccgaagccgatgaccaccagcccaacgaccacgccaaggtggtgaggcaatggcacgaacatggtgaggatgccggcgaacaccagcacttggccgaggcgaatcatgaccgggtccttgaatcgcatggtcaggaagccggaaagcgcacggcccacggtgatgcctacgtagaataggctggcccagctggcggcggtgatcttgtcgatgccgctgtgcatcaccatatagctggaggcccacaggcccgccgtagattcgacggcgcagtagcagaagaacatcacgaggatttccttggcaccgcgaatggcgagcacgccggccacgccgagcggtttgcgttcagcaacagacaccccttcagcagtgccaaatctctcggcattgccgtcagatgatgcggtgtcatcggtcgattcgccgaccgcaattgcgccacgtttcttccacagcggcaggctcagcaccaggatgacggtcagcatcacctgcaggatcgcgatgtaccgatagccccacggccaaccttggccttgagagagcgcatagcccatgatgtaggggccgaccgatgcgccgacgccccacatgcagtgcagccagctcatatgccggctttcgtagtgaatggctacgtagttattgagcgccgcatccactccgcccgcgccaaggccgtatggtatggcgatggccaacagcacccagtaattcgaggtaacggagaaaccggccaaggccgccgcagtcaacgccaccgaaacggcggtgaccttgcctgccccgaatttcaatgtcattcggtccgaaagcagcgccgagacgatcgtgaacatggaaatcaccgcggagatgccgccggcccacgccaccggcacgttcagatcctggctcatggtgggccatgcggatccgagtagcgaatccggcaatcccagactgataaacgccacatagatgacggcaagcaacagactggccatgtcccatctcccattcacagtacggcaccggttgtgataacgatgtcatcagtctatcgaatagcgcttcagcaacacgcaaacatcacagtttggagtcttgcccgcagtacaccggcgtggaatcggctacgccgcgcgggtcaaagccgatgatgtcgtagttgtccttgagataatcggcggcggtgcactcgatgaaatcctgatgatataccgcagcaccctctgacgaaatagctgtccgccaaagacggactgaggggagagaaatacgagtagcccgctactacccgaggcctctcccccagtcagcttcgctgacaccccctcatcagagggagcttgagataggacggtcaggtatcgatcttggagcggtcgaaatcgtcggcgttgtcgacgatgaactgcttgcgcggcggcacgtcgtcgcccatcagcaggctgaagatctcggatgcctgggcggcgtcctccatacggatgcggcgcagcatacgcgtgcgcgggtccatggtggtgtccgccaactggtcggcgtccatctcgcccagacccttgtatcgctggatgtcgtcgttgtatccgatgcgcttcttgtcgaggtcggccagtttgccggccagctcgtcatcggaatacgtgtagatatattcgcccttgtgcgagcctgtcaacgcgatgcggtgcagcggcggcacggcggcatacacgtagccgtgttcgataagcggccgcatgtaccggtagaacagcgtcagcagcaggatacggatatgagcaccgtccacatcagcatcggtcatcatgatgatcttgtgatagcgcgactgttcgatgtcgaagctctggccggagccggcgcccaccacctggatgatggccgcgcactccttgttggagagcatctgcgtgatcgacgccttctgcacgttcagaatcttgcctcgaatcggcagcagcgcttggaaaccggcgttgcgggcggccttggcggtaccgagtgcggaatcaccctcgacgatgaacagttcggccacgtcgtcattgcccggctggcagtcggagagtttggccggcatcgaggcggattcgagcgcgttcttgcggcgcgtgacctccttggccttgcgcgactggatgcgtgcgtgcatttcgccgacgatcttctccagcacgcggccggattgttccttgtacccgcgcttggagccggtgatcatctcgccgaattgcttgtcggtgagccgggtgacgatcggcttgacctgcgcggtgccgagcacatccttggtctggccttggaactgaggttcggccacgcgtgcggtgaccacggccacgagtccggcttggatatcgtcgcgctccaccttcatggcggagtccttcatgttcaccttgagcttgcgggcgttgtcttccaccgccttgcgaatctgcttggtgatggcgttcatgaaaccgtccacgtgagtaccgccgccgggcgtctccacgatgttcacgaagctcatgattgtggtgtcatagccgttgacccatcgcagggcgatgtccacgccgcaggtgcgttcgatttcctgggcgtgcagttcgccgccctcacccacggcctgggtctcctccttataggtgccctcgccttggatgcgccagatgtcggagatcggctcgcctttggacaggaagtcgacgaagtccttgacgccgcctgtgtgcaggaattccacgacgcgcgggtgcgcgggctgttcgccgaacgcgccatcgacgacctggtcgccggccgtcagcgagaagtcctcctcggccgggctctcggcatcgtcggactgggattcggcggagtcgtcgaagagttcggcatcgctggacgagacatccaaggccggtgcctggtcttgcgcaggttcgactgttgtgtcatcagtggcctcgacggtgtcagtcgccgccgtttccggtacgttttcgtcgatgatggtgattttgaggccgggcaccaggaagctggtctgacgcacgcggtcgatgagctgttcgtatgagaactcggcggttttgttgaagatctccggatcataccagtaacgaatacgggtaccagtggttttgggagataccttgccgatgatttccagctcggtgggtcggttcttgcgagtgcgcttgaacggggaatcgggagacggattggccgggtcggcatccgtgtatacgccagggtgaccttggtggaaggtcatgtggtgcgtcttgccgtcacgatccacttcgacgtccagtcgggagctcagggcattgaccacggaggagcccacgccgtgcaggccaccgacggcgttataagacgagttgccgaacttggcaccggcatgcagtttggtcagcacgacctccacgccggacaggccggttttcggttccttgtccaccgggatgcctcggccattgtccgcgacttccacggaaccatcggtgtgcagggtgaccacaatgtcgttgcagaagccggccaaggcctcgtccacggagttgtcgatgatctcccacaggcagtgcataagcccctgcgagtcggtggtgccgatgtacatgcccggacgcttgcgtaccgcatccaagccctcaagaacagctaggtccttggcaccgtattcttctttgggcatacagtcctatttttctcttcaaatgcttggctcccctcacagaggggagccagatgatcattgatccaggaagtcgcgcagggtctgcgaacgggacgggtggcgcagcttggacatggtcttggactcgatctgacggatgcgttcacgggtcacgccatacacacggccgatgtcgtccagcgtcttcggctggccgtcttccaggccatagcgcatcttgatgacgccggcctcacgcggagacagggtttccagcacctgcttgaactgttcctgcaacagggagaaggccacggcgtcggacggagcgatggcgtcggtatcctcaatgaggtcaccgaactcggaatcgccatcctcgccaagcggggtgtgcagggaaatcggctcgcggccgtacttctgcacttcctgcaccttctcaaccggcatatccagctcgcgggccagctcgtccggcgtaggttcacgccccagatcctgcagcatctggcgctgtacacgggacagcttgttaatcacttcgaccatgtgcacaggcacgcgaatggtgcgggcctgatcggccatggcacgggtgatggcctgacgaatccaccacgtggcgtaggtggagaacttgaagcccttcttccagtcgaacttctcgacggcacgaatcagaccaaggttgccttcctggatcaaatcaaggaagagcatgccgcgacccgtgtagcgcttggcgagcgagaccacaagtcgtaggttggcttccagcagatggtccttagccttcttgccgtcggcggcggcccacttgagttcacgcttgcgcttgaactccatgccttcgctttcggtgtcgagcaggtgctgggcgtacaggccggcctcgatgcgctcggacaggtcgacttcctgctcggcattcagcaggctcacacggccgatctgcttcaggtagtccttgaccgggtcggcggttgcgccggccgcaatcacacgacgcttcggattgcccgaggggatgatgttctcttcctcatcatccgtgtcggagaccacgtaggcacccttttccttgggctgctcgggtgccttggacttggcttcttcctcgtcctcgtcgtcttccacatcatcgtcgtcggcatcgtcctcatcaacgtcgtcaagatcctcgtcgaggtcgtcaacgtccaaatcgtcgtcgttgacctcggcatcgtcatcaagctcgtcatcgacctgagtgtcctcgtctttgacgagctcatcgtccttggccttcttcgcggttttcttcgcagcggacttgcgcgtggtctttttcgagggctctgcggacttggacttcttggcggaagtcttgcgtgcggtggtcgtagagctggccttcttcttggtctcggtctcctcgctggactcggctgtctgcttggttgccgtcgtttccttcgtggccaaaactgctcctcctgatctctcgccgtgaagtgcatataccacatgggcccacttctggcaagggcaaatcgtcaactatgtgagtaaaccaccctccacggacgattattcccacatcgttgcccgacgtgttgccgatcaccacacgctttccttccgcgcatcgcgcgtaaaacctcggaaatccgccgtttctgttcactcagcccgagcaccatgccggtgccacgcctcgatcggcggctgagaatatcatcgccgccagcgaacaatcctcatcgagcagcaggcatcgcaaggcgaacaccattgctcgcggatcgcccagccaccataaggtgtaggcgattacggccaatggctgtatgcagtacggcaccggtgaggcttcggcgatatcgagcaacataccgatgccggcatggcaacgctccttatccggcatcatgccttcatcctcgaatgcgcaagtcagcagctcgcccattcgtgttctcgtacgcgccagatgcggtcgcgccgcgaattccatgagccatgacttggggcaacggctttcatcaataaccaacgagagaatcagcgcatcacgaatcgataaggtctcacgcatgcccaccgcaaacgcggccatcgtctctcggcctaggtcggtgttcccggcatcaagacaagacagccattcgtccaatggttcggccacccagtcggcattagcctgttgcgcgcctcgaagtcgtcgatcattgcgaaattcctgtgatctcgtctccaactcgtcaaagccaaagggctccgtctgctcggcggcgtgccgtttggcgtgtcggctcttacgcggcttgtgcggcgtgttgttgttcatcatgtcctccttgactaatggtgtgcaatctattggtgttgtggtgcgcgccgagccggatagctcatgcgccgagggggtgtgtgcccactatggctgaaaacgccgtatgacgcaggaaaaaacgaccattgtggttctagcttcaaaacccttgattcccaacgttcttgtgttcttcaaaccctgtggataagttattaggcatgtgcacaactgctaacaaccgcgaaatcatcgagccacgcatcattcagttggtgcgggaactgactgccgcccccgccaccgacgaggttgccgacgccctgaaaccggtgatggaacaggttgtggaccaagccgcctcctccagccaaggaggcaaacgactgcgtgcgctgctcgcgttggacgccttcgatattcttgccggcgacgtgactcctgatcggcgtgacgccatgatcgacctggcctgcgccattgaagtgtttcagacggccgcactggtgcatgacgacatcatcgacgaatccgatctgcgccggggcaggccttccgcacatcgtgccttggaacaggccgtacacagcggtgccataggccgtggcttgggcctgatgctcggcgacattctggccaccgcctgcattgaaatcacacgccggtccgccagccgtcttcccaacaccgatgccctgaacgaggcgtttcttaccatgcaacgcgaggtggaaatcggccaggtactggacttggccgtcgagatgaccccactgtccaatcccgaagctctggcgaacgcctcattgaacgtattccgctggaagacagccagttacaccaccatcgctccactgctgcttgcactgctggccgcaggagagagcccggatcaggccaggcattgcgcgttggccgtcggccggccgctcggactggcgttccaactggcggatgacctgttggatgtcgtcggatcaagccgcaataccggaaaaccagttggcggagacatccgagaaggcaagcgcacagtgctgttggctgatgctctgtctgcggcagatacggcggataaggccgatctgattgccatcttcgaagaagattgtcgcaatgacaaccaggtggcccgcaccattgaactgttcacgtcgaccggtgctcttgatcgatcccgcgagcgcatcgctgccctatggggtgagtcccgtaaggcgattgccggtcttgagctgaattccgaagcgcaacgccgtctgaccgaggcttgtgcgcgattcgtccccgaatccttgcgatagtccacaatgcgagccgccggaccatgagaccatgaacaccggtgaaaacccgtgaaagctatgcgctgatgctccggccgcgtaaccggggccatgtacactgaacatgtttagtcgtgattaaaggaaccgtacgatacaacatgagtgagaacgagcccgcacagatgattgagggacgctaccgcatcgtgcgcaatatcgccgagggtggtatggccaccgtgtatgaggccatcgatgagcgtctggggcgcaccgtggcgattaaggtcatgcacacacaactcgccaaaggcccgcatcgggagcagttcgtcgaacggttccgccgcgaggccaattcggccgcgtccatcgccaacccgcacatcgttcaggtgtatgacaccggcgagttcaatggacttgattttctggtcatggaatatgtgcatggcgtcaatctgcggcatgagatgaacgcccaaggcacattctccgtacgtgagacgctgcgcgtggtcgcggagacgctggatggtctggcttccgcacatcgcgccggcgtggttcaccgtgacatcaagcccgagaacattttgatcaatgatcgcggccatgtgcagatcactgatttcggtctggccaaggccgccagccaggccacattgagctccaccggcatgctattgggcaccgccgcttatctggctcccgaaatgatcgagaacaatcaggccaccgcgcaaggcgacctgtattcggtgggcatcatggcatgggagatgctgaccggcaaggtgccgttcgattcggataatccggtgacgcttgttttcaagcatgttcatgaggacgtgccgtccgtggccacggtctgtcagggcattgatccgtccgtggcggcgttcatcgcccatctgaccgcgcgtcaggtggatgcccgccccaccgatggcgcggcagcagctgaggaattgagccagttggccgccaaattgccgctggaggcgtggcaataccgtttgcatgccgaacccatcggaggtgatcataccgatgccaccgctgcagcgctggtaggcaatatcgccgagcaggccccgctgaccggcgtacctgccggtgcagcaacgttcaagccgtccgtaccagcgtttttggccgatgatgtcgcaagcaataccgtcgataccggtggcgccgcagacgtcaatcctccggctcctccggtcgcccccaccacggcacttgattcgtcgacgccagccgatgcttcggctccccataagacgcaaatcatggcacagtccggcagcgagacacaagtgctgcctcaggccggcgatgccttcacccgagcgcttgccttttccgatgagccggacgtcgcttccaacggcaccgggccaaagaagcagcgcagcaaaaaaccgctcatcatcgtactggtgatcgtgctggtactggctgcaatcggcggaaccgccggctggtggtggtttgccggaccgggcagctattggagtgtgcccaagccggatgacgtgacctgcgatgcgaatgcaagcaccgaatgctcgttggccggcgcggattgggccacgtatgagagcacgttgaaggctctcggcatcccctacaagacgcacaaggaatacagcgacgacgtggcggaaggcaagatcatctcttcttccgtgaacaagaccaaggccgttgtgaacagccgcataagcaagcgagccaatcaggagcttacggtggtggtgtccaagggcgtgcggatgaccaccatcccgaaggatattctcgacgcgaattcggccaatggcaaggacccgttgaacgcgctcaagaaggccggcttcgataatgtcaagcatgacgagtcgaaggatgagtattcgatggacacgccgcagggtgtggcattgacgatctcccctgatcccggtaccacggccaagcacaacgatgaggtgacggttactttgagcaagggaccgatgccggtgaccatgcctaacatcgtcggtaagacccaggatgagatgcaagccgcgctcggcgagttgaagctcacggccaatgtcaccgaacagtacgatgacaaggtcgaggccggtcaagtcatttccgcgtctcaggaagccggagcccagctgaagtggggcgatagcgtggacgtggtgatttccaagggtccggagatggcgacgataccgtccggccttgtcggcaaacaggaaagcgccgtaaccaagacacttgaaggtctcgggttcgaggtgaaaaccgacaaggtgctcggtggcctgttcggcacggtacgtaccgtgaaaagcggcgatacggacctctccaacggcggcaagattcgcttgcgcgacgccaacggcaaccccaccgtcatcaccctcaccatcgtgtgagatttgaatgaggctccctctgtcttcagacgagggagcctcatttgttaattacttttcggcttcttcagcggcctgctgggccttgagctcggccttgaccttctgggcgtattcgttcacgaattcctgaccgctcattttctggattgcggtggaaacacgatcggtcagcgaacgcaaatcatcatgtgtaatttcatcagccggcttcttcgcaacctcaatcggcttgccatacaacaccttggtcttgcccttcttgggaatcgacgtgccaatcggctgcagcttgtccgagccgatgatggcggtcggaacaatcgggcaaccggtctcgagcgcaagtcgtgcggcaccggtgtgtcccttgtacagtcgaccgtctgggctgcgcgtgccttcaatgtggataccgaacaggtgcccatcctcgataatctcgcgtgcgtgcttgagtgcgccaagcgacttgctgccaccggaacgatcaaccgggaacacgcccacggacgtgaaccaccacttcttgaacttgcccttcaatcccttgccctcgaagtattcggctttgcccatgaagtgcaccatgcgcgggcaggtaatcggaatcaaagcatcgtcaatcaccgccagatggttggctgcgataatcgcgccaccctctcgaggcacgttattcagtccgctgacagcagggctcaaacgatgatgagcaatagggccgagacctttgacgaagaaccagtagagcacttggcattcctcccgcagacgaactagccattggccggtcgcctgattagagtgacagttatgactgagaaccagaatagcaatgccgacggagagcggccaacccccacgccgggcaacggacaggattccgatacttcgtccaagtcgtcgactcccggtgccgccggaccggccacgaatggtgccgatacaccgcaatcgcatgacatgaacgatttggatgcggcgtgggccgcgttcgaagccgagcatcaggccgacttgcatgacgtggcttcctccaggcaggccaaaaagttcgagaagcaggccaagaaacgcgagaaggaagcactgctttccatagatgacttggatatcggctcgttcaccgatgatgctcgcccgagccgtggcggcaaaaaaggcaagcagccaggcccccgtgatttcaccggctccagctggctggataccgataatgtgatggacgcctatgatgatggcggcttcactcccccgaaccctgatcttggtccggtcaaagcatctacggtactgctgacggcgttgctcatcatcggtctcgcaggcgaaacggtgatgatattcgttcccggcttgaacgcgattcctctcttaggcgcgctgctcaatattctcttcgggctgggcgtcattttgggtctgggcggattggtggccaaaatcctcaaccgcaaagaccgccccggtgatcagggtggctattacgacgacggcgcgagggtgtagttcgcgtaggttgtgtagtccttggctcccctctctgaggccgagccgttaagcaaacagcccagtgggctgtttgtaggcgaggtgtgagcgatagcgaaccaatgtatcacaggcgtagctcgtccgtaattgcggccgagccaagataggtcacgaattgaagtcgatggactcctgcaactcgaaatagttgataatgaaggaaaggtaaacatattcgagcaaacccattccatatcacgccttggacttggcggtttcgatccacttgttgaacagggcttcagccttgccggagtcgacagcatcctcggccagcttgtaggcctcggcgaagcgctcggccagtgtgccgttgccgaccagattgccgtcagccacgatggcggaggcagcgttgagcagcgcggtggtgcgggacgtaatgtccttgccggccaggaagtccttaaatgcgttggcgttgacgtccggcacgccgcccttgagctggtcgacggtaatcttggcgagacccagatccacggtcgggtcgaactcggtttcggtgaccttgccgtcgcgaatctcccagacggaaaccgggccggtgggggcgagctcatccatgccctcatgcgaagtgtagaccaagccggactgaccacggctggcgtagacggcagccatgatcgggctcaccttgcggttggcgcagccgatggccacgtgtgccgggttggcggggttggtcaacggtcccaggatgttgaagacgcacggaatgccgagcgcggcacgaatcgggcccacgaagcgcatggccgggtggaaggtgcgggcgaacgcgaaggtgatgcccacctcgtcgcccacttcgccgacggcctccggcttcaaatccagcggcaggccgaggtcttcgagcacatcggcggcaccgcacttcgaggatgcagcgcggttgccgtgcttgacgatcttcacgccggctgcagcggcggccacggagcccatggtggacaggttcacggtggcgaagccgtcaccaccggtgcccacgatgtcggtggtcccaccggaaacgttcagcggcacggcgtgggagaccatggccttggcggcaccacgcacctcgtcggcggtcagtcccagctgctgctgcatagcgagcgcggcacccacggcggccggattggcgttaccttgcatcaggtcgtccacgaaccactccgattcctcagcagtaaggtggtctcccccgaccagcttggtgagaatcgacttccatgtgatctcggccatgatgccctccttggcgtttcctacgccgtgtgatgtatgttcgccgctcattgtaatggttcgtcatttcaaggccctgaatcttccatattgcaaaatatggcgctattgctgttttcgtggatgtcggttcgtcgtcgagccgttggtttcgtaggcgtgaggggcgttcccgcgtattctgttttccgaccaaagaaatgaatcacgaagaacgcctgggcaaaagctcattcgccggattgccgaacgtcaaaggcgcggttgcagaggatgcgcggatcacggattcgccgccgcgttccgaacccgtgctcgagatccgggtgcgtccacgtgcgggtatgctccgatgctcccgatgcggaaggaggcgccgcgggcatgaccagggcggtggcgtgcggcgtcgtggtcgcttccgtgccgtgggccgagccgggcagccggtccacacgcgatttcgaatcggaacgcgcgtggccgatgagcgtcgcgaaccagaagaccgtaagcggttttccgcacgtcgcgtggcgcgccgccggaagacgccgcccatagggtcgctgaacggttgaaagcgtcgatgccgtctccgttcggcggcctcacgtcgatcggcgtggacgagaccggctaccgcaaaggccacacgtgcatcaccgtggtcgtcgaccacgaacggcatcgggcgatatgggcgcacgacgggtacggcagggacgtgttcggcctgttcttccaaacgttgacgcccgaacagcgcgcctccatcagggtcgtcgccggggacggggcccggtggatcgactcatgcgtgcatgagtggtgcccgaacgccgaacgcgcgcccgacgggttccgcatcgtcagttggacgagcggcgcgcccgacaacccacgaaaacagcagaagcctcttttttgtgctatcccgtaaaactgcgggacggcagctcattttcgccgtttgagccgtgccgtcccacatcaccctttgcggaccgtgacaccataacaccaagaatggcggaatttcaacgattccgtaattcgtactgcgggacgccacgctagtcaatcgattgacactcgtgccatcccgcaacagtgtgggatacgacgtcaaaatccgcgaaaatcgcgtgccgtcccgcgcgtacgacaccgcacgaatacatgctgatgaaccgcatagaaaatggctccccgtgtggggagccatgagctagttactaactagcgatgcgtcacttctcgttctggccgtggcacatcttgtacttgcggccggaaccgcacgggcacggggcgttcttgccagtgccagggaaggtgcggccgtcggcccacggcgtcttgagctcttcgctcttcggacgcttggaaaccgggaccttgccttcggcgtggctgatcggagccggtccggcaacaggcagcgtggactcgccggccccggaggcggctgcggattcggcgatcgcctgcttggcgtccgtatcctcgtcctcttcctcgacttcgccctcggcggcctcgaccacggattcgccgttctcgtcggggccggaggccacggcgatggtgtcggcgctttcggcggtctcctcgacctcgtcaacggcctcgtcggtggtggcgacctgcttgatgtcgatgtggaacagcagctggacggtctcctccttaatggcctcgatcatggagttgtacatctggtagccttcgcgctggtattcgaccagcgggtcgcgctggcccatgccacgcaggccgatgccgtccttgaggtaatccatctcgtaaaggtgctcgcgccacttgcggtcgagcacggcgagcaccacgcggcgttcgagatcgcgcaagccggtctcgccgatggtctcctccatttcgccgtactgctgcctggcgtcctcgacgatcaggtcgcgcacggcctcgacggccttcgcacccttgaggccgccgacgatcttcctgacctcgtcttcgtcgaccttggtggggatcacggtgttgagcgccttgaacaggccctcccaatcccagtccttcggtttctcggatcccttgttggcacccttgatgtaggactcgacggtgtcggaaatgaaacgcaggatgtccttgtggatgtcttcgcccttgagcacggcctgacgctcggagtagatgacggtgcgctgcttgttcatcacgtcatcgtacttcaacacgttcttgcgaatctcatagttacgggattcgacggccttctgcgcggtgcgcacgcccttggtgacggacttggcctcgatcggctggccttcctccatgcccttggccatgacctgggccaccagctgggtgttgaacagacgcatcagatcgtcttccagcgacagatagaagcgggactcgcccggatctccctgacggccggaacgaccgcgcagctggttgtcgattcgacgggactcgtggcgttcggtgccgagcacatacaggccgcccagctccttgacttcctcgtgctcgtccttgacctgggccttgatctcgttcagggtgcccggccaacgcttctcgtactcttccggggtgtcttccggagagtagccttcggacttgagcttggcgtcggcaaggaactcgacgttgccgccgagcatgatgtcggtaccacggccggccatgttggtggccacggtgacggcgcccttgcggccggcgacggcgaccacggcggcttccttctcgtgctgcttggcgttcaggacctggtgtgggatcttcgccacgtcgagcagggcggagaccacttcggagctttccacggaggcggtaccgagcagcaccggctggcccttggcgtgacgcttggccacgtccttgacgatggcggccagcttctccttcttggtgcggtagatgaggtcgtcctggtccttgcggatcatcggcttgttggtcttgatcggcagcacgcccagcttgtaggtgttcatgaactcggcggcctcggtttcggccgtaccggtcatgcccgcgagcttgtcgtacatacggaagtagttctgcagggtgatggtggcgaaggtctggttctcggccttgacctccacgccttccttggcttcgatggcctgatgcaggccctcgttgtagcggcgacccggcaggatacgaccggtgtgctcgtcgacgatgagcacctcgccctgggtgacgacgtagtccttgtcacgcaggaacagttccttggccttgatggcgttgttgaggtagccgatcagggcggtgttggccggctcgtacaggttgtcgatgccgaggaagtcctcgaccttggtgatgcccgggtccaggatgccgacgaccttcttcttctcgtcgacgtcgtagtcctcgtcgcgggtgagcttcagcaccagcttggcgaactgacggtaccagcgggtcacgtcgccttcggccgggccggagatgataagcggggtacgggcctcatcgatgaggatggagtcgacctcatcgacgatggcgtagtggtggccgcgttgcacgaggtcggccttctcccaggccatgttgtcacgcaggtagtcgaagccgaactcgttgttggtgccgtaggtgatgtcggcgttgtactgcttgcggcgctccggcggcttctgctcggtgatgatgcagccgacgttcatgccgaggaagcggtagatacggcccatcagctcgctctggtagctggcgaggtagtcgttgacggtgaccacgtgcacgcccttgccttcgagagcgttcaggtaggtaggcagggtggcgaccagggtcttgccttcaccggtcttcatttcggcgatgttgccccagtgcagggcggcaccgcccatgagctgcacgtcgaagtgacgctggccgagggtgcgcttggagacctcgcgcacggtggcgaacgcctcgggcatgatctcgtccagactcttgccgttttcgatttcctgcttgaacttcggggtttgggccttcaggttctcgtcggagagggcggaaatctcgtcctccagggcgttcacggccttagccacgttctccagcttcttgagctggtggccttcacccattcgcagggctttgtcaacaatatcgaccactgggttctcccttgactgataagtggtggtgtccgcgtaccagaatagcgcctcacaccgtcagcaatcgaatttttcgacctttttacgaaaaaatggaccgcttccatattggaagcggtccatgcggtatcagctgatcatgtcagcagcccttaccctcaggctttcttgacattctccggagtgtcgatttcgaacacgccgtagctccaaccgtgacggtgatagacgacggacgggcgcccggtctccttgttcacgaacaggaagaaatcgtgtccgatcagttccatctcgtacagcgcctcgtcgatgctcataggctcggcgatgtgcagcttgcgacggatgacaatcggcgtatccccaacctggacctccacggattcgccagggccaagatcggaggcgaccgcagcctgcgggctgttgttcggctcttcctccggctcctccggctcgggctccggggcgataacacccagatccaccgggaccgggttcgcgtaaccacgacggtgatccttgcgacggtcacgagtacgacgcagacgcagcgtcaacttatccagcgccatgtccagcgcactgaattcatcggtgctggaagcctccgcacgcaccacggtacgtccggcgataacggtgatttccacgcgcttggcggtatcggcctgacgcgggttgccctcatgggtcagcacgatctgcgcgcgctgagcatctggggcgatagcggtcacacgattcatcttggtctcgaccacatcacggaacctttgcttgacctgcgtgtggcgtccggtaacgacgatttccatgttgacctcctctaactcaagcggtgtaacccgctatatgtgttccgaacggcatcatcaccgaccgggtatgtttcattgtagacgaacaatgggtgaacggccggaaactcgcccagagaatatatgtttattcccgggcttttctctgcaatgaaacgatgtatatactggggttttggcagcagtctcctataagaagatttgataccggtttatcaggctggctcgtttgttcgtcatggtaaataccgcaatggataggcagcgttttcttgctctttctcgcacataccaagctcttacagatttgattcgtctccatacgacacgccacaacacgcccgacacgccccatccgatattcggcgcgtcgttcacgaatcgcccaactatgcccaactatggagaaaacaggataactgggcaacgtcatggcctcaccgcagggcgggatgccgccttttccgcaccttatgtataattgcaggcttgagacctcttgatggccgcggccgtgatcttcattgggatcggctgaggaacttccgggctccatagagcacgatggcggataacgtccgcccagggtgacctgagagatagcgcaacagagaacagaccgcccgtcctcgacgggtaagggtgaaacggcggtgtaagagaccaccgggcctctggtaacagtaggtcgcatggcaagcctcatcgggagcaaggccaagcagatggcggtaagggctgctcgcccgtgtcatcgggtaggctgctagagcctggcggtaacgtcaggtcgagatggatggccatccgtgccgtgcgttcgcgcacggcacgacagaacccggggtataagaggtctcatttttttcttggctacaccaacaattcggcggcgactcgacggagggtttcggggctgtggcctttgcggccgccggcggaccaaagccgacgctgacggacccgacgatcgaggccatgggttttgcgggctatttggcggcccaattcccatgcggcatcttcaaagatgccattttgctcagcttcgtcacacacctgttcagccagcttgcggtccacacctttgcgagcaagttccatgaccgtaccacgacggcccatcatgcgaccggcacaatagcgtacggccgattcggcataagcgctgtcgtcaatcagttgcacgcgaatcagccgttcgatgacctcgtccacgatcgcctcgccgtaccctttggcaagcaatcgttcgcgtaacgcaccggatgcacgcggggccgcgtccagcaaacgcaatgcagcctcgcggcaagcgtccaaatcattgggatcttcgacaacggcagcgtctctcccccgtcgagaaaaacgtcccgacggtttcgactgaacatgctgctcggcaatgggcatgtcttgcgacgcaacaggattgcgccgcaagaacgcttcggcactaatcatgttcaggccttagctgtgccggccttggcacgggtcgttttggcagcaggcgccgctgcggccttgctgtccttggccacgtcggccgcagcagcctcgctgacggcggccgctgctgcggcttcgccatcttccgcgaactgatcggcggaaccgatcagaccgaactcggccttgaccttgttctcaatctcctcggtgatggccgggttgtccttaaggaactgacggaccttctctcgtccctgaccgagctgatcaccctcataggtgaaccacgaaccggacttcttgaccacaccaacctgctgggccatgtcgatcaccgagccctcacgggaaatgccttcaccgtagagcatgtcgaattcggcggacttgaaaggcggggccatcttgttcttgaccaccttgacgcgcgtgcggttgcccaccgcttcgtcgccgttcttcaaggtctggatgcggcggatgtcgagacgcacggaggcgtagaacttcagagctttaccaccggtggtggtttcagggttgccgaagaacacgccgatcttctcacgcagctggttgatgaagatggcggtggtgccggcctgagccaatgcgccggtcatcttgcgcagcgcctgactcatgagtcgggcctgcaaaccaacatggctgtctcccatttcgccttcgatttcggccttcggcaccaaagcggcgaccgagtcgatgacgatgacgtcaagcgcaccggagcgaatcagcatgtcagcgatttcgagggcctgctcgccgttatccggctgggagacgatgagtgagtcggtgtccacgccgagcttgcgggcgtaggccgggtcgagcgcgtgttcggcatcgatgtaggccgacacgccgcccttcttctgggcattggccaccacatgcaatgcgagcgtggtcttaccggatgattcggggccgtagatctccacgatgcggcccttgggtaggccgccgatgccgagcgccatatcgagagccaacgaaccggtgggaatcacctcgacgttctgctcgggctggtcgcccagtcgcattgcggaacctttgccaaaactcttctcgacctgcgccagcgcggtgtccagcgccgccttgcgcttgggatcgagctcgtgcttgtcctcggctgccgggtccttggccggcttggtctcaagtgccatgatcttctccttgtcgaagtcgtgtgcgaatcggatgcctccaccgtatgacggacatgccatgtgaggcaatccaaaccaaccattgtggttccagcttgcccgagcttggccacctggcctccttaagccctactgcggtaaggattatggcagatggcaagcaccctgtgcacacgtatgcggcttcttgtcactgtggataactataaccatacacacgaacatttgttcgaatttggcgtgcaacacgccgaaatcgccaatttcacgattcagcgactccgtaatcccgcagtgtcagacggcgggcatgggcggcgcgttatgatcgtagccccaacgcttggagtccggaacctccatttggtcgcagagcacattccagaccacgcgtggctcctcccccgcgtccagcgcctcgaccacggtcatattcgccagtttgggcatccgttgatcacgcgacagcgaacgaccgtaggtccgaccgaacacctcttcaagtaattcccagaattcccgttcacgcatacacgccagtgtgccaccaaccgcaggacagcaaaaacccgcatcgccacaagcgatacgggttcacagctagacatagattacgggacgcggcttcacaccgccaaccgatcagccctcgaccgagtcgagataatcagccaccatgcgcagcatgcgcgaagtggagactccgagcgcatcggcgatggagctcagcagttcggagctggcttccttctgtccacgttcgacttcggaaaggtagcctagcgaaacgcctgccttctcggagacttcacgcaacgtgcggcgatcgcgcgtgcgcagctcgcgcagcacatgaccgatagcaccacgcagcgaaaactcgcgaggctcctcctcagccaccacgggctcggcggcggcagtcggcttgtacgacggcgaatcctcatcccacatacgttcacgaacggcttgacgctgatccttggccttcttggcggcctgtgccttgagcacctgctgctgggcgaacatcaccgcacggcgctgggccggagtcagttcacgcatacgggcgacacccggctgcacagccatcggcttcttggcggccacatccatctgttcgttcactcgggtcatcgtttccatcgccatcgccccttcccaggtcggttcagtgtttccactatgtacaacacgacaacccaacggttttattccttaaaacttgctgtgaatagactcaagttttgcagaacgtggaatacggtgaggcgacgaacctcttcgcgcatgccatcaagatggagttcgacggctttgagcacttcggcatggtccgcggtgaggcttgcggggatgcgcaggcccacatacaccagtccggccggcttgtcaccgtccggaccggggccggccacgccggtggtggaaaggccgatgattcggtcgccgtattccggctggctgtataggcgagcggtaccgatggccatctgccgggcgacttcggggtgtacggcaccttctcgatccaatagggccttgtccacgtgcaggatcgaggccttggcattgatgtcgtaggtgacagcggagcccaacaacacgttggaggcgccgggaatacgcacgaacgcatcggcaagcaggccaccggtcagggattcagcgcaggcgattttcgtattgttcgcctcgcaaatcttgaggatgccggccgcgagactgtcgcacaattcccgcattggaatatccgtcacttccgcttcggggcgacgaacgtgttgtacaggtacacggcacccgagtagaggcacaagaccaatgccacgtagatgatggcgtaggtcaggaagtagtaagcggtcatccagaacggcgtggcttgtccgttacccagagaccagaacggcagcagcagcatggacagacccacgcactggaatacggtcttgagcttgccgggccatgcggcggcgatgactttgccgcccggacgctccatgacgaagaaacgcataacggtgataccaatttcgcgaatcaggaacaggatggttacccaccagccgagctcgccgaacgcggagcatacaatcattgcgccgcaagtgagcagcttatccgcgatcggatccatgagcttgcccatttcggtgacctgattgtatttgcgggccatccaaccgtcgattttatcggtggacgcggcgatgatgaacagcaccgcggcgacccagcgcatggtcaggttgttctcaccccaggcaccggcgagaatgtcgagtgtcaggaaaatcaccacgagtacgatgcgcgagtaggtgactaggttcggcggcgcgttccatccgtcggacagcgatgatttgggcgatgactgcttgtccattgtgttctcatccatagtgttcacgttacccccacacttctaccttgagtgagtattggctggatattgactgctattattcgggaatcaggttgcgtgctgatggccgcgtggccgcgcttctctccctccgccccttcggggcacctccctcatcagaggaaggtcgatgggtgaattattcgccgagttcgggctgttgcggggcggtggcttcgagcgagctggtttcgcctcggatgaaggcgagcacctgcggcaggtcctgcggctggacgagcacttcgcgggccttcgagccttcggacggcccgaccacgccacgcgattcgagcaggtccatgagtcggccggccttggcgaagccgaccctgagcttgcgctgcagcatcgaggtggagccgaattggctggtgaccacgagttcggcggcctgcagcagcacgtccatgtcgtcgccgatctcctcgtcgggctccatgctgtctttcttttcggcttccttggccatctgttcgatgtcttcgcggtatttcggcttgcgctgggtgcgcacgaactccacggccttgcgaatctcggattcggacacccacgagccctgcacacgaatcggcttggcggaacccatcggcaggaacaacgcatcgccctgaccaatcagggtctcggcaccgaccgtgtcaagaatgactcgcgaatcggtggcggacgaggtggcgaacgccagtcgggatggaatgttggccttgatcagaccggtgaccacgtccacggacggacgctgggtggcgagcaccagatgcacaccggcggctcgtgccagctgggtgatgcgctggatggagctttccacatcgttcttggccaccatcataaggtcggccatctcgtcgaccaccacgaggatgtacggatagggggccaccttgcgctgggagccggcgggcgcatgtaccttgccggcgcgcacggcctcgttgaagtccttgacgtggcggaatccgaagaattcgaggtcggagtagcgtgcatccatctctttgaccacccattcgagggcctgtgcggctttcttcggatcggtgatgatcggggtcagcaggtgcgggatgcctgcgtaggcggacagttccacgcgcttgggatccaccatgatcagacgcacctgttcgggcgtggcacgcatgatgatcgaagtgagcatcgagttgataaaactcgacttaccggaaccggtggcacctgccaccagcaggtgcggcatcttggtcaggtcggcggtcacgaagtggccttcgacgtccttgccgatgccggagagcatcgggttcgggtcgcccacggccttttcggagcgcaatacgtcgcccaagtgcacgatttcgcgatcctcgttcgggatttcgatgccgatggcggacttgccgggaatcggtgaaaggatgcgcacatccgaactggccaccgcgtaggcgatgttgcgctgcaggttggtgactttctccaccttgacgccggggccaagctcgacctcatattgggtgaccgaagggccacgcaggaagccgacgactttggcgtccacgttgaactgttcgaaggtggaagtcagtgcccggatcacgcgatcgttggccggggtgcgcatcgcatggggctgacctttggtcagcaggttcaggtcgggcaactgatacggcctattggcgtcgtcgtctgtaccgttgccggcggcggcattcggctgtccgtccgtattgggcacgccctggccgactccgctgccatccgcatcggcgcctgcgtaggctccggtcgcggccgccgcggccgcggcaccggcggccccggccgctcccatcgccccggctgcccctgcgagcgcgacagtaccggcctgggcggcactgggtgcccacggatcgtctaccgctcccccaccgggcatggcgatggtctggccactggtgatgacgcgggttcgggaagcgtcgccatcatccgcatcggcagcaggcgcagggctggataggtgcggacgaccgtcgtacgaagacgatgcaatggttcgcgcaccggtaatctcgccggtcatcggatcgaccaccggggtttcggcggtggcaccatgctggctggcggcacggtcgaacggatcgtcggcagcatacttgtcaagggttttgtcgtcttcggtcttggatttgcggccgaacagtcgtgcgaacaggctgggccgtgcatcgccggcctgatcgttgtcgttgccgtcgtcgttgccgtcatgcgagggaacaccgtcggcaaaggcgagtgtggtatctcccacatggaccttgttggggaactggctggcgcttccgtccgtctcctggcccatcggcacatacggtttgcgttggattttagctgcgattttgcgcgcatcctccggcaaatcggtgacgtgggtgccggtaatcatcagcaaggagaacaggccgacgaccacgaaaatgatgatggcgaacacgttggaaaggccccaggcgagcggtgagccgaggaagaagccgaacaggccgccggcggattgcagaatcgtgatgtcgaatccggtgtggtcggcggcgatcgccacgtcgatgatcgaacagatcgaccacatgaacagcacccaaccggtgaccacacgcgggttattggaccctttaccggaattgcgcatgagtcggaaggccacggcggcgagcaacaccggcagcacgacgctcatcagaccaagcacaccggccgcgatggcgtgaagcagctggccgaatggaccgctgacacggaaccattcggacgcgcagaacagtacggcgagcacgagcagcaggaagcacaaaccgtcacgacggtaggctgggtcgtattcgccgacgccggtgacggcgcgtacgccggagccgaacgcgcgcggaatcgcgagcaggatcttcttccacaacggctcaggttcgaggtcaagctcgggctggaccttggtttcgccatcatgggtagacccgttgtctttggatttacggggtttggtgctgttggaggatgctgttcgtgccatatcgggtctgattctactagtacgggggtgcatggttggtgacgacaccgtgacgatatggtcgattgacgaatcccgacagccgattcgccgcggttcgtcgaggttcgtccgagtcgattccccgctggagcgcgaatatgccttatcatgggttgcatgacacccgcagagcgtgcgagcgcagtcgcatttgcactcaagaactgcgcactggaagcgatgacgccgggcgaggcaacgatgcgcgccgcggttgcctacgaacgtggcttggagcccgtgacccatctcatcgacgtggcggacgagcagaccgccatgcgtctgcgcgccgccgccgaccctgccggaaaggatcgtctggctgccggcagtctggatgatcatgccacggatcgcgcggatgcggtgttcgcacgtaccgtattgttggcggaacgtcggtggaatccgtctggcgacttggacgagttgaccgccattcataaggggctgttcgaaggcgtgttcgaggatgcgggcaagttgcgtacctcaaacaccacacgcgaggtgacgaacgaccgggctcgggccgcgaatccggaggcgttcttcccggctgggctcattgagaccggcgcgcacaacatcgcgatggagttggcggacaagcgcaacctgcatgcgttggatcgcgacgtgttcattcacgcgttcgcttctatttatgatgagctcggttatctgcatccgttccgtggcggcaatgcgatggtgctgcgtatattcggttcacgcttggcgcatgacgccggctgggatctcgactggggctcagtgacgcgcgaggagtatcgctccgccaagcactcggcatatcggggcgacacgtctgcactggagacgatgttcgacgcgatactacgcccggcgaatccgacgcgcgtgttcttgatcgccggctggaatcaggggcctgcacactgattgcgggtgattgcaccggcctttggctgattcctacgccgtgatatcccccagatgatgctgggtgtattcgtcggctcgggcgtcgatcgggtcgtagtcgccggcgtcggcgtgcgcgataatggccatcgcgttgtcgaccagtttcgggttcagggcctgcagccagtggatgcgcgggtcacggccgaaccatcccatctgtttgcgggcgagtcgcttggttttctgtgcgatgtccgcgaaggcgtcgttcacatcccagatgccgtccagcaggtcgatgatctgctgatagccgagcgcacgtacggcggtggcacccagatgcgggcgcaaccgttcgacttcttcgatgaacccatcgtcatacatctgcttggtgcgcaaatcgatgcgatggtccaaatccgggcggtccaggtcgagtccgatctgcacggacggaatcacgtaccggtagcgcggcagactggccgaatacggtttgccggtaagctcgatgacctccagcgcacggatggtgcggcgtggattgcgtgggtccatgcgcgcggcggcctcggggtctttggcccgcaactcgtcgaacaaagcaccggcaccctcggttttctcgcgttcctcaagacgtgtgcgcacgtcgggatcggtgccggggaaggtgatgtcatcgatggccgctctggcgtacaagccggagccgccgacgagaatcggccggatgccacgtgattgcaggtcggcgatggtctcgcgcgcaagctgctggaatcgggccacgctcatcgtgtcttcggggtcgatgatgtcgatgagatggtgcggcacggccgcctgttcctcggcggtgggtttggcggtgccgatatccatgccacggtacatctggtaggcgtccgcgttcacgatttcggcccgctcccccgcttcggccagacgccgggcgatggcgatgcccaaccccgtcttgccggacgcggtgggaccgacgatggagacgactcgttgcgtcatatacgccccctcagtgccgcacggaataggtctggccggcggccacgtcggggtcggcaagcagattatggcggccggcgtgtgtgacggtggccgtgacgaaatcgccgatttcaggtaccggttcgccttcaggcacgccgatgtgcaccagcacgccggttttctcgcggccggtgacacggtgggtgtcggtgtccttcttgccgagtttgccggtgatcatcacttcgacgtcgcggccctcgaatgtggcgaggttctcttcggtgatctgctcctgcaacgccaccagacggtcgaaccggtcctgcaccacgtcgcgcggaatctgttccattgcggcggccggcgtgccggggcgtggcgagtagatgaacgtgaacgccgaggagaagcgcgcctggcgcaccacatccatggtctgctggaagtcctcttcggtttcgccggggaagccgacgatgatgtcggtggagatctgcgcgtcgggcatggcggcgcggatgcggcccagtatgtcgaggaacttggcggagcggtaggagcggcgcatcgcgcgcaggatgcggtcggagccggactgcagcgggaagtgcagctggtgcatgatgttcggcgtttcggccatcgcggcgatgacgtcgtcggtgaaggcggccgggtgcggcgaggtgaagcgcacgcgttcgagaccgtcgatggtgccgcaggcgcgcaacagcttgctgaaagcgtatcgatcgccaataccataaccgaacgaattcacgttctggccgagaagcgtaacctccttggcaccatcggccacacattggcgaatctcatcaagaatgtcaccggggcggcggtccttttccttgcctcgcgtggtgggcacaatacagaacgtgcaggtgttattgcagcccacggaaatcgccacccacgagctgatgcgggaggcgcgggcggcgggaagctggctcgggaactgccgcaattgttcagtgacctggacctgcgccttgccggtcgcacgattctgatccaacagcttgggcagatcttcgatgttcttggtaccgaacaccgcggaaacccatggcgcagtatccgcgatcttcttgcggtcaagctgggccatgcagccgccaacggcgatctgcaggttcggccgaaccagtttgacgcgattgaatcggccaatggtgccatacatgcgttcggctgcgttctcgcgtaccgcacaggtattgagcaccagcaaatcgaggtcattgtcattgatctggtcctcggttgcaggcacgtagccattggcctccagcacgccggcgatgcgctcggaatcgtgcacgttcatctggcagccgagcgtatggatatggaacacgcccttgccgcgtttccccagcaaaccatcggttccatcggctgcaatcgaggcgcgctccgcctcggtcatcatgtcttcattcataacgaccgattctatcgacggggttcgtcatgctccggtcacgtatgccattggttgtcacgatgtcaaattatgggttcttggaaagattccccgcgaacgtccagattggctggaatccgccgagtatattggtggacgtgatacttgaccgacatagccgactcaaaacctccgatctgcaagcccgtctcaaagcgttggatcttccgggaggcaccttcactcccgaacaggtcgttgaattcgttgacctcatgcaggtgtatgaaggcgcgatgtacgagatcagcaccaaactggagattctcgacgacgagttccaggtgcggttcagccatgacccgatacatcatatggaacgccgtctgaagtcggtgagctcgatcatcggcaaactggagcgcaagggtctgccgatcggcgtcaattcgattaaggacaatctgttcgatgtggccggcatccgcgtgatctgtaattaccgcgacgacgtgtattccgtgtccaactatctgtcgtcgcagtccgatattcaggtgctgcgcgtcaaggattacatcaagaacccgaaacagaacgggtatcgttcattgcacgtaatctacgcggtgcccgtgttcctctcctcgggcgcgcattacacgccggtggaggtgcagttccgcaccatcgccatggattattgggcgtcgctggagcatgcgctgcgctacaagaccgatttgccggacaacaagctcgccgagcattcccagacgctgctcgactgcgcgcgctcattgcagaacatcgaggtacagatgcagaacatccaccgcgacatcaacggcgcgccgcaagtgggcgaagcgcctaagacctcggactgaggtgctatggaatcggcctgcggccgattcattcaccgttgcggccacttcggcagcctggccggcgcttgggccagtagggtgccgaggaagatgagggcgcagccgaagtagccgcgcggggtcatcacttcaccgagaagcaacgcaccgcctaccgccgagaagaacgattcgaggctcatcagcaggctggctcgcgtcggtggcacccattgctggccgaccacctgcaaggtgtacgcgatgcccaccgagccgatgccggcgtacagaatcggaatccaggaatgagcagcgccggcccagtcgaccgagccttcgatcagcgaacccgcccaactcagcacggcggtggtgcagaactggccgaatgaaagcttgatggcgtccacggtgccgcccaaagtatcgatcaccagaatatgcacggcgaacagcacggccgtgaacacgagcaggatatccgccaggccgatcgaaccgaaaccatcggtgatgcacagcagatagaagccggcgatggacagcgccacggccacgaacaccagcatgccgatgcgccggcgcaggaacacgaaggccagcaacggcaccatcacgatgtacatggcggtcaggaatcccgcacggccggccgatttgccgtacagaatgccatactgctgcagggtgctggcggtgaacagcacgatgccgcagatcacggaaatgaccaccgggttggcgagcaatcgcgccacggccgaatcgggcttgttcgcattcagcttggcaccggtgatggtaacgacgtcggatgcaccgttcgatgcggcatctgtggagacggccacggatgcctcggtcccaacgacatcggccccggctgtatcgcccttatccgcgctcccccggccacgcatccacagcagaatcggcaccaaagacagtgctcccagcgtgaagcgcgcggcgttgaagaacatcggcgacatcgaatccatgccctggacctgcgccacgaacgcaaaaccccagatcagcgcggtcaacaacaggctcagcatgcctacgagttcttgtcttttcacggggagccagcctaacgtgcgaatgtgacagacatgaaaaagcccggccacaatgtggtcgggctgtgacgtttgacgggcaggctacatgccgctcgccaatcggctgtcgaggctagtccctgttgccgagcagctgcaggatgtacaggaacatgttcacgaagtcgaggtacaggttcagggcgcacaggatggagatcttcttgaccatttccgggccctgggcctcgtattcggtcagcagcgcgcgcgtggactgcgcgtcgtagatggtcatgccggcgaacaggatcaggccgatggcgcagacgatcttggtcatgccgtcgacctgcacgaaggcgagcacgatctgcgagatgatgagcacaatcaggccgatcatcaggatcgggccggccttgagcatgttgaacttggtagtcatgccgaacatggtcagcgcaaagaagaacgcggcggtgacaccgagtgccacgccgatcgagccgaggtcgtagaccatgaaaatcgagctcaaggtgaagcccatcaatgcggcgtacacatagaacatgacgcgcgcggtggccgacttcatcttggtgacgcgcatgccgagcaccacggccagggcaatctgcaccacgcacaggccgatgaggcccaccatgccggtggccatgaggaagctgtagtaggctccagtgatctggccgagcacggcgaccacggcggtgacgaggatgccgatggtcatctcgccgtacaccttggtcactgagactcggcgggcttcctcatagttgtaggtcatcgtcgtgttgatggtggccgcacccgcaccggcaccagtaccctgcggcacgtattggtaggtgggagcgccctgcggctgggcatagtagttctggccgtaaccggactgtgcgtattgctggccatatccagactgttgggcggcgttgtaatcaggcgtgttgtattgcgggttgtattgcccgttgttctggggctgctgaccgaatgtcataatcgctcctttagcgtttgttccagtaccaatcttagaggaacaaagctgaacattccatgaatatgatcgatcggctcgttctgctcatctcaaagcgtaacgggcgtttccaccatgcgcgtggcatgcacttgagattcgattgacattcgatcgcagcttggaccaccgcgcgattcactgcaacgtgaaggtatgcgtcaccttggtgtcttgatccgttgataggaacgcagtgacatccaccgtaatcggcgaatcgtcttgcagcacatagcccagcgtcaccgttgccgcggtcccgggctgtgcttgggccaaatacgaattcgcgtcatagccttcaggctgatcgaagtatactgccgtctccagttcggtgccgttctggaacacgttcgggtgagccaaagtggcgaacgagttgttcttggacgtgttgttcgtccattcataagtcaccagagcggtgggcttgccgttatagtcgttgacgcttttcacggcggagactattttcacgtgggcaccttcgatatcaccttccaaatcctgctcgccctgcgctttctgctcggatgccttgctcttggaggcatcagacgatttgcccgcggactttgatgatgaggattgtgacgtgtcgatgcccttggactccttaatggaatcgtcaatggccttgctggcagcggactgcatggccagcgtgatcacaatggccaacaccgacagcaccgccgccacaatggacagcaccttgccgcgtttcttgccccggaaggtgcccactatggcgataatcgccagtatgacgccgatgaagccaaggattgcggcgatattgttgacgatgggaataaaactcagcaccaaacccaacgcgccaaacaccacggccgcgatgccgcagatggtggtatgcagatgttgcggttgcggcggctgagtctgaggctgttgtggctggtactgctgtggggatgagggaaccggctgcggggcgatgttgtggttggacatgatgtgctccttctcgtatcttccccgaaatagggatgtgagcacgacgctaccggccgcgaaacagcgacgttagtggacgaacggtcattgttcgttgcctgttcgggcaatacggaggtgataacggtgcccgcatgtccagtggcgggggccggatgcaggtcatacagtggaaagcatgacgaacccacaacgcgccgccgggccataccccggtttccgacccggctcacggcctgacgctcgccctatgcccggcacggggtccccggttcctacaccggatacggacgaggtgcccgtgactacgcgcgtatggtgttcggtcgttatggtgccattggccagtttcatgtgcatggcgcaaacctcgttcttcgcccagaattttgcgcaggattccgcaggatacacgctgatggtcctctgcaccttgctggcattcccggcagggttcctgctcttggcccgcagcgaatacccggaggcgacgttctggatcgcctgcgcgctggtggtcgtgttcccgtatgactcgctcatcgcactgatggcgatgacctcattgctcgcccgtcgttcaaaccggaacacgaccatccgcgccacggttggcggcaccatcgtgacgctcatctcccagctccgcgacgccctgcaacagcccaaagcctcgatttggcatctgattttcgctcaaccgcataccggcggcgattcaggctccccgatggtgatgctggtggaggagccgaccgtcatcatcaccgccacggtggcctcactggtgttcgtgaccatcgctacgctcatcggcctgcatatccgttcgcgcgcccgcctgcgcacggcgaatgcggtggccagcgcggccaccacgcatgccgcgaccctgcagaccgacctgaccaaccagcagctcgccgacgccatcgcagccgaagcgcacgacaccctcgcgcattccctgtccctgatggccctgaacgccagcgcgctcaaggcggaggcggccaagctcggcgactcccccgaagcgcaatcgttggcggataaggccgaggacatccgtcggcagtcggccggggcattggacgaggcccactcgatcatcgacatgctgcgcaacccgcaccaggcatgggagcagctcgccccgtccgacgacacgtcgctgacccgcgaatcgctggatgcgctgattgcggacacgcgcaactcgggcacgtcgctcaacacctggatcgatatccagcagctgagcgtgatggatgagtcaatcggcaaggtggcctaccgcgcgatccaggagggattgacgaacgcgcggcggcacgcgcccggagcgccggtgtcgttggaggtctccgccacgccgcaggcgggcgtacatatccatatcagcaatccgatcgccacggatgcgaccgagacgcagcgggcccatggggccggactgcctggtttggcagcgcgcgtgcactcggtcaacgggcaatgccggtatgggatggacgatcggcacctgttccatgtcgacgtgcaactgccttggcgcagctaagatggctagcgtgagtgagaagaacgggaatagtgtgtctggtggaaagcccgaacgcggcggtctgaccggaagcggcaccggcttagagcccaagccgatccgggtcagcgtcatcgatgacgatccgatgatctgccaggcgatgagcctgatcctcaacgattattcccacgggcgcatcgaagtcgtctccacgtccaccgatggcgagacctgcgtgaggcgggctgccgaggaaaagccggatgtggtgctgatggacatcgccatgcccggcgtggacggcatcgaggcgacccgtctgctgcgctcgctctcccccgcgccgcacgtgctgatcctgacctcgttgagtccgtccggcaccgtggaacgcgcggtggaggcgggcgccgaggggttcgtgtcgaaaaccgatgcggcggacgatatcatccgccgcatcatcggggtatgcgagggcgcgccgcagttcaacacggccagtcagaaacagctgatcgacgatctgagcgtcacgcggccgcgttcgcgccgcgatgaggcgcgcgccctgctcgacgcgctgcccgaccgcgagcgcgaggccgtgatgctggcggccgagggctatacgaacgccgaaatcgcctcccgcatgttcatttcggagcgtacggcgaaggcgcatctttcttccgcggcgaacaagctcgacatgggccgcgtgcagatggcgcggctggtggagcgggccgatctgccggcgcggctgtaagtcgtccggttgttgagccgtatcagtcataatgggaatatgagtgaagcgattattcgaacattacgtagggatgactatccggcgctgatcgacctggtgcgccgcacctggtatgccgaattcgatgagcggaccggtctgctggcggccgaagcggactgggagaactgtctggcgcgcaccaccaacgcgttcgtcgccgaactggacggccagccggtcgccctgatcgtggggcgcgtcgatgcgctggaccatcggagcccgctcaactcgcatcggatcaactcgtggaacgcgctggcgcggctcgtgttcgcgaagggcggaatcaaggccgccggcgagattctgggcattctcggcatcgacaaacggctgcgcgcccaggccgcgagcgccgggcatgactatgcggcggaagtggtgctgttcgtacttgacccggcggcgcgcggccacgggctgggccggcgcatgttcgagacgctgatggacgcgttccgcctggccggcgtgcgcgactacttcctgttcacggacaccacatgcgatgtcgggttctatgtgcatcgcggcctgacgcaggtgtgcgagcagtcactgcccgcatccgtgccgggagaaaacccgtcttcgttctacttgtatgaggggtcggtgcccgagccggcgtgatgtgcccgccgtcgggcaaacactggtaggcttgagcacaagttggtatgccggcataccgtccacaggccggcgacgaaggggctgacatggcaatcagtgcgaaggaactaccactcgggaaagtgttcaccccggatttccggttcacgatcccctcattccagcgggcctacatctggaagaccgagaacatcctgcaactggtaagcgacttggatgacgcctgcaagtcgcccggtactccgtacttcctcggctcgctaattctggtgcgcgagggcgataaccgttacgacgtaatcgacgggcagcagcggctggtatccctgtcgatcatcatcgccgtgttgcgcgatctggagcgagacccggacctcatgcgccaactcgacgcgctgctggtggagcccggcgacaagctgcgcggcatcgtcaccgagcctcgcctcacgttgcgcgagcgcgacgcagcgttcttccgcgaacacgtgcaggaagacaatctcgaatccgtgttcgatatgaacgacgatgatctggcgaccgcagcgcaacgcaatatcgtagccaacatccgtaagacgtacgacgagatttccaattggtcggatgccgaacgccagcaattcgcgcagtatctggtcaacgaggtgacgctggtcatcgtgaccaccgacgatctcgacggcgcgcatcgcatcttcgacgtgatgaacatgcgcggcctgccgctcacctcgtccgacgtgttcaaggcgcgcgccacggccggcctgtcgaccgccgaacttgacgtgtacgccgcccgttgggatgacatcattgacccgattggcgacgatccgcatgactgtgaggaattcttcgcctatctgcatctcgtgctcacgcacaagccggccaccgacaagctcatcgaggatttcctggccgacgtgctgcaaccgtacatcgacaaaggcacggtgcccacgttcatcaaccaggtgctggcaccctacgcgatggcgtggcggatcatcgcgcgccccagcgataccgtactgcccgccgaggtgcgtagccggcttgagggattggatgattaccgcagccacgaatggaagcccgtggccatgtgggcgttggtcaattcgtatcgcgggctgggcgacgccgatttgtcgccgtttgtggttcgtgcctcgcgtatcgccagaaccacggccacgctggaatcgttgggtgcccatgacgagcgtcggctgctggaaattctgaccgcattggaacaggtgaccggcatccgcacgctgaatcgcactggagcgttggagcggcgcggttatgcgaacgccgccatccgtgatcttgacaagggctatctggtccagcgcgtgaacgggttgcatgtctcggacggcgaccgtgaaggcgcattggtccgtttgcatggcgagatgcagggtgacggcgatttggtccgtctgctgctgattcgcgccaacgagcagaaggccggcatgcagttggatcgaccacgccggttcagtgcgctgccgattatgccgttggatatcgaacgatcgaaatcgtttgcggactggccgcaggatcagcatgatttctggatgtaccgactcggcaatatggcgctggtgcagggccctgaggatcagttggacaggttgagtgaatatccggcacgccgcgaccgcatgctgctgcgcgcggattcacgtcgtttcccgctgaccaaccagttgaaggatttcgctgactgcacacccgcattgctggaagcgcggcaggaagaggcggtccgactcatcgtggaatactggggcatccggtatgacaaggacgcccgcgatctgaccaagcagaatgtcgatgagttgtcgaagacctctccacggccgtctcatagttcgcggcgcgtcacgatccggcaggtgattgacgcgggtcttctggtgccgggcgagcgtctggtgtgggagcggccgcgcaagggcgagcgctggtttgccacggtcaccgaaaacggtcgtctccgtctggatgacggctccgaatatccgactccgaccgccgcggcccgtgccgccgccggaggacgtcgcggcggcggtctggacgtgtggaagcgcacgcgtaacggccagaagctcagtgacatctggaagcagttccgtctgcaggcgcagtaagctacagtaagccggcacgtcattggtggctcccccttccgtgaggggagccacacgcttgtctatgccagcgccgccacgatttcagccggcgttttgcaatattcgggaaaatgcttggctagttttttgtcatacgtcaccacataggtggccccggattgttgtgcggcggcgataataaggtcatcctcgaaatcgttatgcgcgtgccgcaacgactgcgccaattcacattcctccgcgccaatcggcacgattgtcatgagctccttgagtttgctgattcccgaccatgccacctccggcaatatcagcttggcggtggtcgcaacgaccatggattcgtcattcatgaatcgttctttgaatcgttccggggtgatgtagaacacgtccttcagcgacagtgacgcacaggacagctttacctcccgctcgacgcatcgttcgaacagtttcatgacatccttgatgaaccgaggcgtacagagcatgtaataaataaggatattggtgtcgcacaagatcgacacctgctttgactgcctcatgacagactccgctccttctccaaataacgcgcatagtccgactgatgcctgtattccttcagccgttcgtcagctatctcatcgcggaactgcttgtaggtaaggccttccatgaggtcggtgtcttctgagatcagtccggccttgaccagttccttgtgcacgtatccggcaccttctcgaatcagtttcagcttgcgctgcttttccgcctcgcgggcctgctcttcggcggtcgtttccaataccggcacttccttgcggtcggcgatgtacaaccacagcgaccggattacgtcactcaccgatacgcctttgcccttgaggacttcttcgacctcgttcttcagtttcgcatcaatgcgaacgttcatttggaccatggtcatggcaacctccattccaaagatgctatacagtatagcatactgacgtgcatgaaaaaggccggcatccgttggtggataccggcctttactccccctcagtcagcttcgctgacagctcccctcagagaggggagccagaataagtcacttcatgaggttgcgcagcacgtactggaggatgccgccgttacggtagtagtcggcctcaccgggcgtgtcgatgcggaccaccgcgtcgaactcggtcttggagccgtcctcgtgggtggcggtgacgtggaccgtcttgggggtcacgccctcgttgagcttctcgacgccggcgatatcgtaggtctcggtgccgttgaggcccagggactcataggattcgcctgccgggaactgcagcggcagcacgcccatgccgatcaggttggagcgatggatgcgctcgaagctttcggtgatcacagccttgacgccgagcatcaccgtgcccttggcagcccagtcgcgcgaggagccggtgccgtattccttgccggcgagcaccacgagcggcaccttgttgtcgatgtagtcgcgggaggcttcgaagatcgtggtcggcttcttggcgaggaagtcgtaggtgaagccgccgggcgtcacctcctcgcccacggaggcgagcagctggttgcgaaggcggatgttgccgaacgtaccacgcaccatgatctcgtggttgcctcggcgagaaccgtaggagttgaagttcttcggctccacgccgcgctcggtcaggtacttgccggccgggctggaggccttgaacgcgcctgccggggagatgtggtcggtggtgaccgagtcgcccaggagggccagcacgcgggcgccgtggatgtcggcaaccgggtccggcgtggccttcatgccgtcgaagaaggtctgcttgcgcacgtaggtggacttgtcgttccacgcgaacagctcgccttccggcacgtcgaggcccttccagcggtggtcgccgtcgaacacggaggcgtagtctttgaggaacatctcgcggctcacagtgccatcgaccacggcggccacctcggagttggtgggccagatatccttcaagtacacgtcattgccgtccgcgtcggtgccgagcggttgggtttcgaagtcgaagtccatcgtgccggcgagcgcgtaggcgatgaccagcggcggggaggccagatagttcatcttgacgtccgggctgatgcggccttcgaagttgcggttgccggagagcacggcggtgacggtcaggtcgttggcgttgatcgcctcggagatctcgggcagcagcgggccggagttgccgatgcaggtggcgcagccgaagccgacgagctggtagccgagcgcgtcgaggtcgtcctgcaggccggcggccttcagatagtcggccacgacctgcgagccgggggccagcgaggtcttgacccaaggcttgggcttaaggcccttggcatgtgcgttgcgggcgatcaggccggcggcgatcatcacggacgggttggaggtgttggtgcatgaggtgatcgaggcgatggccacgtcgccgttttcgatgtcgaaatcgccgcggaagtcggtggacacggccaccggatccttgacggttttctcggtctcgtaggcgggagcggtcttctcgaacatctccttggcttcggagagcagaatgcggtcctgcgggcgcttcgggccagcgatggacggcaccacggtaccgaggtcgagttcctcgtattcggagtactgcggttccacgtaatccgggtcggaggcgtcgccccacagcttgttggccttggcgtaggcttcgaccaacgcgacctgttcttcggagcggccggtcaggcgcaggtagtcgagcgtgacgttgtcaatcgggaagatgccgcaggtggagccgaactcggggcccatgttgccgatggtggcgcggttggccagcggcacggaggcgatgccttcgccgtagaattccacgaacttgccgaccacgccgtgcttgcggagcatgtcggtgatggtcaggaccacatcggtggcggtaacgccctccgggatggagccggtgagcttgaagccgaccacgcgcggcacgagcatggagatcggctggccgagcatggcggcctcggcttcaatgccgccgacgccccagccgagcacgcccagaccgttttcggtggtggtgtgcgagtcggtgcccacgcaggagtcgaggtaggcgagcgtgttgccgttggcctcggccttgctcatgaccaccttggccaagtattcgatgttgacctggtggataatgccggttcccggcggcaccacgcggaagttcttgaatgcctgctgaccccagcgcaggaactggtagcgttcaccgttgcgctggtattcgatgtccatgttctgctggaccgcgtcggcgatgccgtacttgtcgatctgcacagagtggtcgatgaccatatcggactggacctgcgggttgatgacctccgggtcgccgccaaggtccttgaccgcgtcacgcatggtggcgaggtccacgatgcagggcacgccggtgaagtcctgcatgatcacgcgggacggcgtgaactgaatctcgtggctgggttcggcgttcggatcccagtcgagcagggtcttgacgtgttcgtcggtgatgttggcaccgtcgatgttgcggaccagattctcgaccagtaccttcagcgagtacggcagatgatcgatgccgtcaagattggcgatgttgtagtaatcgaagtccttgccggctgccttgagggtagccagctggtcgtcgcgtaaggacatgcttcctccgaaatcatgaatcggcttatgatgccgttgattatccgatacaaatggtacgggtacgttactttggctctggcgtgtcggcttgaagtgtgagacaattcgccgctattagatattgaaaccgtgctggcgcagtagattgccgaatattctgccgaccagcggagccagccatagacagatcacgaaaatcatggccgcgccgcccaacgcaatcagcgtggccaccaacgcagtgccggtaggcagaatcagcgcgaagaagttcgccacgaacgggatgaacgcgccgatgatgccggccgccgcgaaccccgcgaccagcgcacctcgccagctgttgagcggcctcgccacacgggccagcacaaacacgcccatcaaaaacagaataatggcgctggtggcgcgcaaagccgacagatcggcgtcattgttcaccacatcccagcccatgacgttcggcagggtccatgaagccagcaacaccgacagcgcggtggcgatgccgcccggcagcgcgaacgtgaccacgcgcttgaggaatcccggaatatagcggcgcgtgttcggcgcgagcgccagaatgaacgcgggcatgccgatggtgagagcgccgatatacgtgatatggcgcggcaggtatgggtatgggatttgcgtcagcactacgccgagcgagatcagcgcggagtacacggttttgacgaggaacaggctggccacgcgctccatattggccatgacctgacggcctcgtgccacgacgtccggcaggtgcgagaacttcgaatccaccagcaccacctgggccacggccttggtggcgggcgccgcattgcccatggcgatgccgaggtcagcctccttgatggcgagcgcgtcgttgacgccgtcgccggtcatagccaccacgtggttctgcgtgtgcaacgcctgcacgatggccttcttctggtcaggcagcacgcggccgagcacatcgacgttttcgagcacgcgggccagttcgttcacgtcctcgggcagttcgcgcgcgtccatcgccaccggctcatggtcgcctgtcagtttcactctgcgggcgatggcacccacggtcactggattgtcaccggaaatcacacgacagcgcacaccctgctcacggaaccaagcgagcgtccgctcggcgtcctcgcgaatcttctcagagcacaacaccaacgccaccggctcagcctgcacatccagttgcgggtcgtccgagacattggctccctcaactgctcccctcagtcgcttctggcgacagctcccctcggagaggggagctgtagaccgcgcaaccagcaacacacggttgccgtcattggcatactcgttaacctgctgcaacaccgacgaatagtcaccctcaagcgcagaaataatcacctccggcgctcccatgtaccaggtctcgccggatttacgcaccgcactccatttgcgcgccgaagagaacgggacacgagactcaaccgcacctgccccatatccttgggccttgagcccggcgagtacggcttggccggtgccgttgggctgctcttcgttgcagcagtcgtagagggcctgcgtggctgcctgttccgcagccgcattggcggaatcgagcatcacgagccggttgaaggcgataccgccatcggtgatcgtgccggttttatcgaggttcagcgcgtccacgcgagccagtgtctccacggattcaagctcctgcaccagcgtattgtgacgggcgagacgcatggcggccaccgcgaagttcagcgaagtcagcagcaccaagccttcgggaatcatgcctactacgccggcgaccgcggaaaccacggcttgccgccattcgccggtggagagtgccgtgccccaaccgccgaccgtatgaatctgcgaaagaatcagcagaatacacagcggtaccacgaggaaggtcatgaatttcagaatcgtgttgatgcccttgttcaggtcggacacggttttcttgtataccttggcctgcgcggtgagcgtggcggcgtaggaatggctgccgaccgcattgaccttgaccaatgccatgccggagaccgcggtggcaccggaatacacctgctcccccaccttgtggcgcacggtacgagattcgccggtgagcatggattcgtcgagttccagtccccaggtctggatgatctgcccgtcggccggcacctgttcgccggcacggatccacagcaggtcgtcgagcacgatctcgttgtggggcacctccacgtccctgccgtcacgatgcacgaggaattcggaggccacaaggatggaaagcttatccaacgtgcgcttggccctgagttcggtgacgatgccgatgcccgtgttgatgatgatgacgaaaccgaacaccgcgtccctccaggaaccggtgatcagcaccagtaccatcgcggcgaagatgatgccgttgaacagcgtgaatacgttggctcgcacgatatcttgaaccgaacgcgaggtggaggttttcaccgcattcgattggccactttcgatacgttgcaccacttctttgggggtaagaccggttgctccgatctcaggcatttccacggctgttgttgcactcatattccccagcctaccgcgtcttgtttcgcaatccactaaggctcagggatgattcagggtgctttctcagcttcaagggcctgattcggctcaggaaacggtgactttgatctcgcgttcgtggggttcgtcgcgcgtgatggtgagcacggcgtcagtaatagtcattggcttggtatcggcagtgtcgccagaatcggcactgttggtgttgaggcgaaggatgacggcgtacagcagttcatcttcgggcgcatgctttggatcaatgagagcgactggaataccggcttcacgcgcattggtcaacgtctggttccagctctcccggttggcgtcggtaacgtcgatgccgctgataaccacgattttgaccgcgcgagctacgaaatcggcaacaccctgctgtgcggtggccgcattcttgtcgacgccagtatgagcatccatactatcggcaccgttttcgctggtagtgccggcgtcagaagattcggtttcaccggatacaccatcagttgcgtttgccgagcttgcggatgtttcgagcgaggcatagtagacattgagtttgtcatcagacagcgcattgatgacgaactcgtctgcggcggtgtcagtcgaccccacaaagccgactgtgacatccgtgggatgtgtggaatcgtgggcgacttccggcatgctgtcttgggtatcgccgaccgccctaccggccggcgtgcaggcggccagggacaacacagccgccatgcaggccagcaatccgagaattcgtcgtgtcatatgctcacctgtcagcgggtaaacaaggccaccgtctcaacatggtgggtcatcgggtagatatcgaaggcacggatgtctttgagctcgtagccttcgccgatgagtgtcgcggtgtcgcgtgcgaggctggtgggatcacaggcgatgtagaccacgctggatgcgccggccgcggcaatctggcggcagaccttggcacgagcaccggcacgcggcggatcaagcactacgacattcggcttggccagatgcgccggcacatggtccagcgtgcgcgagacgtcacccgcgcgggcgtccacgtcgttcaggttcatggcgcgcagattgcgctgggcgttcttgacggccacacgcgcgccttcaacgctgagcatgcgggtgcgttcaccggtcattgtggccagcggcagggtgaacaggccggaaccggaatacagatcccagattacggcgtccgccgctgactgcagctgcccgttgaccaggttgatcacgtgcgtaccgagggcgatcggcgcttggcgatgcacttgccagaaaccgttggcgtcaacctgatagtcgaaggtcgtgccgttgatggtcacctgttcggtgagcagctgggagccggcgcgcagttcgccgtccacaagtacggcgtaattgtcgtctgctgccgcggtatcgacgatctcgccgcgcggttcgggcacggaaagacgaatctgggagccgggttcaaagccgccttcccacacgtgttcgcgcttggcgacgtccagcagcgtgcgcgtggcaagcggcatggtgtcgatggccacgcggttgtgtgtgccgcgccggcgcatggatggtatgccgttgtcgtcggcaatcatttcgatgcgggtacgccaattgaggccgccggcttccctgtcgccgggcatgcgttcgatgggaacggccacgtcgatatggccgagtcggctcatctgttcggagacggtgatggccttccacttgagctggccgggcaaagagacgtgcacgagatccgcgccgcccgcccccccgcccatcgccaagggaccggcaagtggccataccggggtgactcggtcttcagacggctcgagaacctcgacgacttcgccggtccagaaccggtcgtcccggtcgtggggctcgtcaagttcgactcgcacgagttcgtcgggcaaggcgaagcggacgaacaccacacgaccgtcgatatgggccacacagcggccttggtcggcgtatcgttcgatacgaacttcagcttgcatcatcgtcctttccggttgcgctcggttcgagttcggcatcaacagcgacttcagtctgtgtcttcttagccgcgaccttatgccggtgcatcggcgtggcaataatgaggtaactcacccaaatcgccaatgcccagaacggaatgcccatgagcaggcgggtcacgccgagtgcagccacatggttggtcagatacagcggcacctgcaccaccagccgcagcaggaacagaccgacccaaaggccggtgacaatcatataggcgcgtttcagggccttgtcgtccatccagtcatggaaccatgccttgaaatgctcggtgggcaggctacggatgaattcgacgaccaaacccagtccgggcacgcgcgcaatcagcgacacggcaagcaacgcggcatagccggcattggtaatgaatccgaagatgtagtaattgcgggcctcatgagtctgccatgcccaaatcaggcagatgcctaccgccaccagaccagagaccgcgcccattaccgactggcgctgaatcagtcgcacaataacctgcaataccgccagcacggccgaaaccgcaatggtgagattcagattgctcgtggccacgaacagtacgacgaacaccacgccgggcagcatggattcgatgacgccacgcgggccaccgatggcgtcgatgacggagaaatcctcgccttcattgccggcgtcggctagagcggacaggccggtgcgtttgttgtctgccaagtctcttcctataaatcagcgaacttcggagaacatcgggccgcgagacagcgtggtcttcacttcggtctgctggtcctggctcagcggacccttcggcttgttgtccggaatgtccttgaagtgttccttgccgttctcctcgccggcttcggccgcggccttggcggccttacgctcagcgggggcgaccggcggatgcatcgggatcagatcgcgcggcgccaaaggctcctcgccacgctcgacgacgatgtcggcgaagaacttgttcagcgcctcggtctccgggctgtccggatcgatagcagccttgccggagaagatgccacgcagcatccagcgcgggccgtccacaccaacgatgcgcgtgttcacggttttgccgcccttgacattgaccggcagcttcagttcggtgccgaacacaccgtccacttcagaagcggccttgttggcttcaagcaggtcaccgcgaacgtcatcccacagtcccagggtcttgggtgcggcaaaggcttcgatctccaggctggaggagccgaaggtgatggtggaaccaagcacttgctgggtggcgcggttggccttgatgcgcagctggatgccctggaggaagggcaggtagtaggcgccgagatccagataatcgtcataatctggcacgtcctcatcattgacgtcccacgggcctcgctcttctccgcggccctggtattcgctggccggttcggcgagcacggtctccgcgctctcagcctttgcggcagcgttcgcttctgcggcagccaccttgtcttcatcgacaggctcaacggccggctcggcttccttcttgctcttcttcttgccgaatccgaacagtcccataattcctcgtttcatgtaacggttgcaaccttgctaacactagcactcaggcttagagaaagctgagtcacacgtcgtatgtgatggtaagtggcgcgtggtcggaccaacgcaactcgtatgtgggggccttgtcgatcacaaaaccgcgcgcggtctccgccagctcgggcgtggcgaactggtagtcgatgcgccagccgacattgttgtcgaaagcgcgcccgcgctggctccaccacgtgtacggaccctgaatatcaccggcgagcgaacgcatcacatccacaaactcatattcatccagccacttgtccacgtaggcgcgctcctcgggcaggaagccggcgtgcttttcgttggccttggcgttcttgatgtcgagcggcgtgtgcgcgatgttgaaatcgccgcacaataccgcctgcttgccgccgtgcgcggcctcgtcgcgcaactcgcccatgcgagtgagcatcgtgtccagaaaacggtacttctgttccatcttggtcgaatcatcggtgttgccggcgtgcacgtacacgcaggccacggtgatcgtgtatccctgcggcgtcttgacatcggtctcaatccaacggccggaatccacatcctcgctcaagcccggaagtccatagcgtttatcggtcacctcaagatcggtgaggagcccgactccggcacgacccttgacacggcagacctcgttcagcgaatgcaggtcagagggtgaggcgatcttgccggcggtggcatactcgaaaccgaattcgccgaaaatcgaatcgacatcctcttgcggggcgcgcacttcctgcatacaccagacatccggagcatgtttgccggcccagtcctcgatgcccttgcgctttgccgcgcgaatgccgttgacgttcgatgtggtgatggtgatggtcatgcagccatactattttggcctctctaccagtaccgcactcacgattacattgaggtataaaaaattagctccctcataagagggagctaatttagaatgtcctatcagtccaaaccgagctggagcttgccgccggggatggcgtcgagcaggtctcgggtgtactgcttctgcgggtggtcgaagacctcgtcggtggtggcatgctccacgagcttgccgtgctgcatcaccacaacctcgtcggcgatctgacgaaccacggccagatcgtgggtgatgaacaggtagctcaggcccttttcggcctgcagatcgttgagcaggcgcaacacctggtcctgcaccagcacgtccaaagcggacacggcctcatcgcacacgatgacgtccgggtccagagccatggctcgtgcgatggcgatgcgctggcgctggccaccagagagctcgttcgggtaacggcccatcacggaagccggcatctcgaccatgtccagcagttccttgacacggttggcacgccacttcttgtcgccgatcttgtggatgcgcagcggctcctcaatggaacggaagatggagtacatcgggtcgagcgaaccgtaggggttctggaacaccggctgcacgtggcggcggaagcccagaaggtccttggacttgaacgtggaggtgtcgcgaccttcatagaacactttgccggaggtgggcttcaggaggtgaagcaccatgttcgccacggtggacttgccggaaccggattcgcccacaatggccagtgtggtgccacgcttgacggagaaggacacgtcatcgacggccttgaacatctccttcttgcggggcagcttgaattccttggtcaggtggtcgacggtgatgatgtgctcgctcttttcgagcgtgctttcgccggcgatgtggtgatcgagcagagcgtccgcatcctcaccacgctccttggcggagatgatgcgctgggaggccagcgacggggcagcggccaccagtcgcttggtgtacgggtgctgcgggtgctggagcacttcaagggatgggccggattcgacgacctgacccttgtacatcacgacaatgtgctgggcgcgctcagcggcaaggcccagatcgtgggtgatgaacagcacggcggtgcccaacgagtcggtgagcatgtgcaggtggtcgaggatgcgcttctgcacggtcacgtcgagggcggaggtcggctcgtcggcgatcagcagatcggggcggcaggccaagccgatggcgatgagcgcgcgctggcgcataccaccggagaactcgtgcgggaactgacgggcacgggtagcggcgtcgggcagaccggcctcggacagcagacccgcgatacggtcatccattatggagccggtgacgtacttcttagccagataccaggcctggtcgtcggccacgccggccttgatgaggtcgtcggccacgcgccaacgggtttcggagcccggaacccattcgttggtgaagcgggcgacggccttgtcgaaggcctcgccagacacgccggcttcagtcaaagccttcttggcctcggtcatgagctcgggcagttccttggcgccgaggaaggtctcgtcgtcgttgcccttgacttcgacctcgtcgccggccagagccttggcaagggcggagcgcttttcgtgagccacgtccatgttgttggccttcagtgcttccttgacctgggtgccgatacgccacaccgggttgaggttgctcatcgggtcctgaggcacgagacccatcttggtgccgcgcagcttgtcgaactcgctctgcttggcgccggcgatttcctcgccgtcaagcttgatggagccgttgaccacgtgaccggtgccgggcagcagacccagcacggccatggcggaggtggacttgccggaaccggactcgcccacgatggccacccactggccagggtagacggtgaagttggcatcgcgcaccgcgtgcaccggcttgccggtgtcagtggtgaagtcgatggccagatccttgacctcgagcagcggaccatgctctttctgcatagccagcatcttggcgttggtgttgtcagtcataatgtttctccactcccctcgctcaggccgtacggctcttcggatcgagggcgtccttgacggcgtcgcccatcatgatgaacgcaagcacggtgatggccagtgcggcggacgggtagaacagcaccagcggatcagtctgcaggttggtctgtgcgctggagatatcgccaccccagctcaccgtggtggtcggcaggccgacgccaaggaagcttagggttgcttcggccacgatgtaggaggccagcgaagtggtggcgatgacgatgatcggggccagggagttcggcaggatgtggcggaacagattcctggcaggcgtggagccgagggccgtggaggcggtgttgaattcgaggttcttcgatttcagcacggcgcttcgggcgatacggcatacgccgacccagccgaagagcgtcaacaccagcacgatcttccaaatggacttggaggtcttgaacatctggagcaccacgatggcgccgagcagcataggcagggcgaagaagatgtcggtgatacggctcagcaccgcgtcaatccagccgccgaagaagccggcgacggcaccgatcagggtaccgacgatcacgaccagcagcgtggagagcacgccgacagacagtgaggtacgggtgccgtagaccacgcgggtgtacacgtcgcagccctgcaggtcgtagccgaaggggtgtccggcggaggcggggctcaaggagttgcccagatcgcaggcgttcggatcctgcttggtgaacagaccgggggcgatggccaccacgatgatgaacaggatcagcaagccggagatgatgaacagcgggttgcggcgcagggttcgccatgcgtcggcccacatgctggtggccggagcggattcgtcgacggaatcgacgtcctgcaacggggtctcgtcgagaggagctacgtaacggtcctgaccgggcagggtttccatgaagtattcggttcctggctcgccggtctggttgagctcgttttcagtggtttcgtttgccatgtgactcactcctccctatcacgcgtaacggatacgcggatcgagggccgcgtacagcatgtcgacaacgaggttgcacactacgaaaatcagcatgagcaacgtgacgatggacactaccaggttcgcctcgcccttcagaatggactggtaggtgaggaagccgatgccgtggatgttgaagatctgctcggtgatcatggcaccacccatcagggcgccgatgtcctggccgaggtaagtgacgactggaatcagggagttacgtaacacgtggcgcagcatgacctgaccgttcgacatgcccttggcgcgtgcggtgcgcacgtaatcctcggcgatgttggaggagatttcggagcgggtcagtcggatgatataggccatcgacaccgaaccgagcaccatggccggcatgagcagatcaaggaagccggggtcggcgcctgccgtcaccggcaatatcgcccactgaataccaaagacatattgcatgacgaagccggtgacgaaggtcggcacggaaataagcagcagagagacgatcaggatgacggtgtcgtaccacttgcccttcttgaggcccgagataatgccgaagaccacaccgaaaatcgcctcgaacacgaacgccatcaagccgagcctgatggtgaccgggaaggcgcgggtgatttcgtcgagaacgggctggccggcgaaggtatcgccgaagttcagggtcagtgcattcttcaggtagataaagtactgaacgatgaacggctggtcgagatggtattctgcgcggatctgggctgcgacggcgtcattgacgggcttgtctccgaacatggccttgacagggtcgcccggcagggcgaatacaagggcatataccagaagagtcgtaccgagaaccacgggaatcatctgcagaatgcgtcgcagaagatacttacccatacggttgctccttatttcctagaccggccagaaagggtatagtacgcccccgccggtcgataaatactccgacagtttaccgcatgcccggactgtgatatgtaaatttgcgttaacgcaaggtttgagattgggcaatgttggtggatatgtccatggttgcggtcggatagtggatactttaacttggttcccgatggcgtgagcaagcacccctcacacaacaaaaagggcggggatcttgcgatcctcgccctttatttccgaactacctaacggtatccgttcagtgagtcagactcacttcttggacatctcggtgtaggtcgggaggttctgccaatcgaaggcgtagccggacttcacgttgagggaagccacaccggaggcgttggagtagtacagcgggatggccggaaggtcgttgaggaggatttcctcagcctgctggtacagcttgttggcgtcatcagtgctggaagcggcagcggcctgcttgcacaggtcatcgaaggccgggttcttgtagtcaccatcgttggagccgttgccatcagcagcagcggtggagtacagctgccacaggtagttctcggcgaacgggtagtcaggctgccagccggtacggaaggcgcccttcatctgacggttggtgacggcgtcacggaattcctggaaggtcgggatcgggttggtggccgcgtcgatgcccaagttgttcttgagctggttcacgatagcatcgtagagcggcttggcaccaccatcggcgttgtaggagaaggtgagctggccgtcgtacttggagatggcgtcagccttggcccacagttccttggccttggaggcgttgaacttcaggttgtcggcacccttgagggagtcggagtagcccggggtcttcggggaggtgaactcggtggcggcggtggcgttgccgttgagcaccttgtcgatgagctggtcacggttgatggccatggagatggcctgacgacgcagctggccttcctcgtcgttcttgaagtggtcaagggaggacgggatggtgaaggtctggatgacggagccggcctcggagtaagcctggaccttcttgtcggtcttgaaggtcttggtgaaggcagccgggacggattccatcacgtcgaggttgccggcctgaatgtcacggtaagcggcggagtcgtcggtgtagaccttgaaggtcacgccgtcgttcttgggctgctcgttacccttatagtcagggttcttgacgagggcgatttccttgttgtgatcccagtggtccagcttgtacgggccattggagacaggcttctcgccgaaggccttcggatccttgtagaaggactcgggcagcggggcgaaggccgagtagccgaccttgatcgggaacacggagtcggactggttcaggtcgacggtgaaggtggtgtcgtccacgaccttgaggccggagagctgctcgtcacctttgaggccatccttctgcagatcgtcatagccggcgatggcggagaagaaggaggagcacttctgggcgttcttggcgttggccacgtaggaccaggccttggtgaaggactcagcggtcaccggagtgccgtcggtgaacttccagccggacttgatcttgatggtgtactgggtggcgtcatcgttcggggtgatggactcggccacttcgttggaagccttgccgtccttgtcgaaggagaccagacgggagaacagcaggtcgaccggcttgccgccgccggtttcgttggtgttgcccgggatcagcgggttctgcggttcggagttgtacgcagtgatgatgttggagccagcggtgtcaccggaggcagcgttgctgttggagccgccgcaggcgctcagcagcatggccacggagcaagccatggcagcgaaagcaagagctttcttcttcatatgttttctcctattcattaggttgcaggacgtctcagccccgcctcatgcgaacggggctggattccccgtcaccgtgagacttgcatctcacgatgtctcgaacaatccaaccccgttgctgattacctgtcatttttgcgcacttgggagacaagcagtgtattttttgttacacccatgtaaaattcaggggttcttgccggctaggttcagtctttgctgagtttgttaaccaatgtccacatagtggtcatgcccgcggaaaggcctgtccgtaacggttcttgagctgctcgatggagacgtgcgtatagcgttgtgtagttttcaaggaggaatgcccgagcatctcctgcacctccctcaaatcggcgccgccgtccagcatgtgcgtggccgcggaatgccgcaaggcgtggggactgatatccggcactccggcctctcgggccgctctgtgcacgatgtcacgggctatgcgttggtcgatacggccgcctcgtgcgccgaggaacagggcgttggcagcacgggacttgactgcatccgttgccgtacgggccagtaccggccgcccctgttccagccaagtctccagcgcacgctgggcgggtagtccgaacggcaccacgcgttgcttgttgcctttgccggtgactttgatggtgcgattggagaagtcgatgtcggcgatatccatcgacaccagttcggcgacacggatgccggtggcatacagcagttcgagaatcgcggcgttgcgctgcgattcggcggtgactcgggcgttgtcgcgcttgtctgcacgggcgggtgcctcactgcggtttacggtatcggccgacttatcagctgccttgccgctgccgctgccggacgcggctgccgctcccccatcgtccttgtactggtttgttgcaacggcatgttcagcgacatccaataattgctcggcctgggattcggtgagcaccgcgggcagcgtgctgggaatcgagggagtcatcagtgtggcggccgggtcggtggtggtcagcccatgctcataggtccacgcgaagagcccgcgcacggccacggttttgcgggccatgctgctgcgggcgtgatcgcgcgattccaccgccatccagctacgcagatcatccagcgtgatctcgttcagatcggtcacgccgcgcagctcgaacaggtgcaggcatgccgtgagatccgcgcgatacgctttgagcgtattcgctgacaggccgcggttggacttcagataggagacgaaggagtcgatatcgccgtcgaactgcgtagatgacactctcgttctcctccgaattctttatggccttgggttacggccggggtggcgtgttgcgccgctccggcacgggtttcaatgtggcaatctgttcctgatggatggtcacgttctgggccgggcgcgaaccattggcggcggcgtcacgcaccatctccaacgtgtatccgtcccaggaaaccacgtgacccacatagtcgcggaacttcatacggtggtcgaccgggtcaatgccatcggtgatgcgcaccaccacgcgggcaccggccggaatctgccttggtaacgtcatacgtcatcatcccccttaaccattcgccgcatcaacttcgatgcgtttcccgaaaaacggtacagactaccttactcctttgggcctttcgaacagcggagccacacggtcttctcacgaaaacaagcgggaacttcatccccctcgcgcggccttcttcgtgacaggcggcgaggggaacctgcgcacgggcctacatggcggtacgcagttacatggcggggcgcagttggatgatggcctgacgtggatggacgaagccggtgatggcttctcctcggcgtgcggagaacagcagggtctgctgccagccggcttcggggacggcgagctcgcgttccgggaatccggcggcagttgtgccggcttgcggcgcagcggtggccgtaccgtcttgtgcagcggtgatgccggcatgtgtcacggcggccttgtaccggcggaaggggtcgccttcggcgaagaatcccatcacatcctgctcgccggcggcaccagcgtgcagttggtcggccatatcggtcagacgtgccgccatgcggcgcagcagcgcttcgacgttcagcgagtcttcctcgaccatcgcgcgcgtgcggtccgggtcggtcagggacacgcgggtcatgtccctccagcagccggcggccagcgcggcggcgatgttgcggtccgggttggcgaccagttcgttgatcagcgcggtggacaccacatgcggcatgtgggagatcatcgccgcggccttgtcatgcgtttcgtcgtccacgacgatgacgcggttgccgacgtccttggtgatcatcgcggcgacgtcgaggaagcggcggtagtccgtggactcgtccacggtgatggcccatagggcaccgtcgtacagatgcgggtcggcggcctgccagccggacagttcgttgccggccatcggatgggcgccgacgtagcacttccccagcccggcagccttgacctgatcgcggaccatgcccttgaccgagcccacgtcggtgagcgtggtgttcggatggtcgcccatgagcggggccagggcggcgaggattgcgggcatcgccttgagcggattgcacagcacgaccacatccggctcggcatccatgagttcggagagcgtgctcttgcagaaaatgccatcggcttcggcctgggcgtaggggtgcgggcgatggttccacgcgacgacgcgcacgccgcgctcggtcaggcggcgtgcgagcgagccgccgatcaatccgagtccgacgattccgactgtatctaccacagcagttccttccttgcttcctcggtgtactgccagccttccggcgcgcgattggtgatgtggacgccgccctcgggcagcatccaggcgtcgaccggcgggttcgggcgttcgcggcgtgggtagacggccagggtttttgcccagtcgccgtgtccggcgatctcttccagtgcggtgcggaatctcggctcccagggggcggcgtcaagggtggcgatgaagctgtaggttccgtcgtggcctttgatcgggcgcgagatgaagctggtcatgttcagtcccgcatcgcgcaggacgtccagcaggtcggcgagtacgccggggccggtgaccagcgggatgaaggtgatgatggtttcgaagtcgccggcgtcattgctgtgggcgcgggcgttgagttcctggaccacatcacgcggggcgatgacaaggaattcggtgtgcgcgccatcgaaatcctgcacatgttcggcgagggtgtcgagatcgtagagttcgccgcagatgctggggccgagcgccacgcggccgggcttcaggtcgcggcaggcggcggcgttggaggatgcgggttcgggctgcaaatggtgttcggcgatgaaccgggtgcattgggccagaccgtgcgggtgagcgctgacggggttgccggtgcagtcgtagatgctgtggccgcgcacggtgaaggcgttgaaggccacgtccacactgatccgggcgaagccggccgcgttgggggcgtcgatcagcgcgtcgagattcgggaccacatagccttcgacgttgttttcccatgcgatgacgccccagccttggcgcgactgtacggcctgcatgatcgcgggcacgtcgggcagagcgatgaggtcgaagtcgccgagtgtggcgaactggtcggcggccgtcattgccgcctgatgggtgaaggtgccctccgggcccaagtaaaacagtttcatgcgtgccataaggttctatggtagcggccgtaatcccctacgcccgccgatacgcgacgcattcccgggaatgtatcgccatatatagttacgcgcgcgattcagaatgagtgggaatgacgaaccagcgggcgggaagaatgagcaggacgacttggaccagtatcaggccgtacagccagatgtagccggcatgttgggagaagaacggcatgtcgccttggaatccggcgacgatgagcgctttgccggatgtggtggtcagcgccatgccccatgcggtcagtgaggaggcgatgaggtgcagggccagtccgaccgcgcccatgcgcgaacgggcgcaccatgtcgataggccgatcagcagaaacgccagcaccagaccatacggaatattcagttccgcacccatacggtgggcgaacgtgcccacaaaggcggaagccacgcccgccgcaatcgtgatcaacgatttgaccagcgcgttctggcgatacgaccacggacgcaattcagtagtgctcttcacagtcatgcgtttcagtataggtggggatatgacttggtgaggaataaacttagctcccctcagagaggggagctagagagaatggtcggctacagccgcaccaaatcacttaccctgctgggcggcgttctggcggcgctgcttggcgcgccacttgtaccagtcctcacggccgaggatgatcttgcgcacgcggatggactccggggtgacttccacgcactcgtcctcgttggcgaagtccagggactcctcaaggctcatcttgatcggcggggtcagggtttcgagcacgtcagcggtggaggaacgcatgttggtcatgtgcttggccagcgtgatgttcacgtccagctcgtcgggcttgttgttcacacccacgacctggccttcatacaccggggactgcggttcgacgaagaagttgccacgggcctgcagacgctgcatggcgtacggggtggcgatacccttgcgatcggaaaccatggaaccgttctggcgaatggtgatggcgccagcccacggcgcgtagccggcagagatggaggaggagatgccggtgccacgagtggcggaaagcagcgcggtgcggaagccgatcagaccacgggacggcacggtgaactgcagacggacccagccggagccgtggttggtcatgccatccatacggcccttacggtcggccatgagctgggtgacggtacccatgtactcttccggcacgtcgatggtggtgttttccatcggctcgttgatcacgccgtcgatcttcttggtgaccacctgcggacggccgacggtcagctcgtagccttcgcggcgcatctgctcggcaagcacggccagcgccagctcgccacggccctggacttcccaagcgtcgggacggtcggtgggcagcaccttgatggacacgttaccgatgagctcgcggtccagacggtccttgatcatgcgggcggtgagcttgtggtccttgccctcggtgccggccagcggggagtcgttggtgccgaaggtcatggagatggccggatcgtccacatggatgagcggcagcggcttcgggtcgttggggtcgacgatggtctcgccgatcatgatgtcgttaacgccggcaacggccacgatgtcgccggggcctgcggattcgaccgggatacgctcgaggccctgggtgcgcagcagttcggagacgcggaagttctcgagggagccgtccacacgggacaggccgtaggtcttgcccttctcaagggtgccgttgtagatacggaccagaccgagtcggccgaggaagtcggaggagtcgatgttggccacgtgagcctgcagcggggcgccctcctcgtattcgggggccgggatggtggagatgatggtttcgaacagcggctcgaggttgtcgttgtccggcaggccaccgtcggcgggctggttcacggaggcgtagccggccttggcggcgcagtagatgaccggcatttcaagcagctggtcaaggtccaggtcgatgccctcgtgctgcacgtcgtcggccaggccgagcagcaggtcggaggtttcgccgacgacctcttcgatacgggcgtcggggcggtcgaccttgttcacgcacaggatgaccggcagcttggcttcgagggccttgcgcagcacgaagcgggtctgcggcagcgggccttcggaggcgtccacgagcagcacgacgccgtcgaccatggagatgccgcgctcgacctcgccgccgaaatcggcgtggccgggggtgtcgatgatgttgagggtgatgccctccgggtggccgtacttggcggccagcggaccggtgtattccacggccgtgttcttggcgaggatggtgatgcccttctcgcgttccagatcgttggaatccattacacgatccggcacttcctcacgctcggaaaacacgtgcgactgctgaagcatggcattgaccagggtggtcttgccgtgatcgacgtgagccacaatcgccacattacggatatctccacgaaccgccatcgaaacctctcttaatactgattcttttgcgtaatcgttcggtacttgcgttctcgagtacttaagtacttactctgaggtgtttattcatacctacacacaaaccgtcacgatggtactcgcacaccttgactatgtcggaacatagaaaagcacctcacaacggcagaactcccgcgtccctttcgccgggacgcgggggttctgccggtaatcaggcaaatatctgttctcccgtcatcgacttccgtcagtcttcgagatcgaggcctttgcgttcgggcaggcagagggcggcgacgcaggcgatgatgaaggcggcggcgaagatgatgaaggccacggccttgttgccgccggacagggtcaggaaccacggcatgaggagcggcgcgatgatggcggcgatgcggcccaccgctgcggcggcaccggcggccgcgccacgcaggcgggtcgggtagatttccggggtcacggcgtacagcacgccccacgcgccgaggttggaggcggacagcagcatgccgaacacgagcacgagggccacggatccggcctgcgagaacgcgaaggcggccacggcggagacggccaggaagatgctcagcgtcttgcggcggccccagacctccaccagccaggcggctaggaagtaaccgggcagctgggcgatggagatggcgagcgtgtagccgaatgacttggtcagggagccgaactggtcggcgagcagcgacggcatccatgtgaacgcgccgtagtaggagaagttcacgaagaaccacgtggcccagatggcgatggtgcgggccaggtacttggagccgaacagttcgcgcgtcttgatcttcggcagcggcttgcccttgggagaggttaccggggctactcccccggcttcctcgaagtagcgcacggccttttcggcttcgtcttcgcgacccttggcttcgaggaatcgcacggattctgggatgtgcacgcgggtgacgattgcgtagagcagtggcagcgcgccgatggccagcgcccagcgccagccccagtcgccggtgttcgggatcacgaagtagccgatcatggcggcgacgatccagccgacggcccagaacgattccagcagcacagtcatgcggccgcgctgtttggtcggcgaaaactcggagaccagcgtggaggcgaccggcagttccgcgcccaagcccagtccgatgatcagtcgggcgccgagcagcatgccgagtgaccaagatagcccgatgtctatttagaagtgcaacacccttgttggtcctgtaattctaacagttcgtcggcgaacgcctcggcgggcgtgcggtagccgagcacgcgcatggggcggttgttgatctcgtcgacgatctccctgacctcctttgccatgtccatccggatctcgcagcgtttgggcagataccggcggatcatgccgttgcggttctcgttgcttccccgctgccagctggagtacgggtcggcgaagtacgtggccatgcccagcccgtcgcgcagcctttcgtggtgggcgaactcggtgccgttgtcgtgcgtgacgctgacgcgcgcgccggccggcagcggcgagaacatgtccagctgcgccccgacgctctcgccggcggtcttgtccggaacgatgcgggccatgaggaacctggtccttctctccacctcggtgtgcaggttgcatcccactccgatgacgctgtcggcctcccaatggccgaacgcgctcctgccgtcggcctccggcgggcgttcggagatgggcactcggccggggatcgggaagcgcgacgtcctcctgccgccgtgcctgcggcgccgcctgtgccctcgcggcaggcaccgcgcccagcgttcccgaagcggcctgctggagtagacccatcggtagatggtctccgggcacacgcgcatgagcgcatcgtccggccacaggacgcgcagcctgccgctgatgagcagcggcgaccagccgcggcccagccattcggccacctgcgcccacaggcggtcgtgcgacagccggtagggctttcgtggcttggatctcctgcggtcggccttgcgctgcgcgggcccggcgatgtagtagcggccggtccatggccccgccttcagtcttttcggccggtacgggcggtacgactcgttctcgttggacgggaaccatgtgttgcgcttgatctcccggctgatgctggacgggctgcggcccagcatcgcgccgatcccgcgtatgctggcgccgttgcctacctcgatctggatgacctggcgttcctcttccgacaggtgcgaatatacttctcccataggtgcgacatcccttcggactggttttctaggcaatttccaatctaacgggtgttgcactttcatttagacaacgggtagggccatggcaccgttggcgatgccgaagataatcagtgtggcggtgaacacggttttgcggcccacgcggtcggcgatgaagccgcccactgccgcgccgatggccatgccgacgaagccgatggacagcacccatgacttttcggtcggggtgaggttgaagtgcgggtcggcggcgatggcggcgactacgaaggagacgaggccgacgtccatggcgtcgaatgcccagccgatgccggaggcgacgaggagtttgcggtgcgccttgttgaagggcagccggtcgaggcgctcgttgcgggtgagctgcgcgggttgcgctgaagtggtggtgctcacgtcgtttcctttctggtaagtggcgtcagatttaatggcgggtcaggtcggtgtaggactcttcgatggccaagctgatgcgttcgacttgttcgcgggtcagcggcttgcggaaggtcatgcgtaatgccgatttggcgatggacggttcgaggcccatcgccagcaacgtggcaggaatctcgtggcgcccgatggcgcaggccgagccggatgaggcagcgatgccgcgcgcgtccaggtcgacgagcagcgcttccccggtgacgccggggaagatgaaggaggcgtgaccgggcagacggcgttcggggtcgccggtcaggtcggcgcgaggcgcgacccggcgaaccgcgtcgatgagcatgtctcgggacgcgaccaactcacggtactgcgcctgcatgcgcgcattcgattcgttgagtccgatggcgagcgccacggcaccggccacgttctgcgtgccagagcgcaggccgcgttcctgcccgccgccggacagcaccggttcgatgggtgtgcggccgcgtaccagcagcgctcccagacctttgggggtgccgaatttgtgtccggatacggacagggcgtccacatcccagtcacgaaaacgaatcggaatctggccggcggcctgtacggcgtctacatggatgggcacgccgtgcgcgtgggcgatgcggaccagttcctccacgggttccacggtgccgacctcgttgttggccagcatggtggagaccatcgtggtacgttcactggcctcgccgtcgagctcgcgttcaagtgcgtcgagatcgagatgtgcttgctcatccacgggaatgcgcacgacttcgaaaccgaaccattcgtgcagccatgccgccgattgggccacggccgggtgctcgatagcggaaatgataatgcgcgggcgacaatttgccggctgttcgccatcggcttcggcgaatccgcagaccggccgcaagcccagtttgcgcatgcgcgccatggcgatgcctttgatggccagattgtccgattcggtgccgcctgaggtgaagatcacgtcatccggccgggcgcccaatgccgcggcaaatgatgcgcgagccgcgtccagcgcgcgggccgcggttttgccgggctggtgcacgctggccggattggcgtaggcctcagtcaggaacggggtcatggcctcgatgactgccgggctcactgattcggtggcggcggcgtccaggtacagttcgccgggttcaccggatgcgttgggggtatcggccatgactagttccaatccaatccgaggtcgatgctgcacacggagtgggtgagcgcgcccacggagatcacgtccacgccggtggcggccacggctggcactcgctccaggctcatgttgccgctggcttccacgatggccttgccgtcgatgagctccacgccgcgacggatgtcgtcgagcgagaaattgtccagcatgatggtgtccgctccgccggcgagcacggcgggaatctggtcaaggcggtcgacttccacttcgatatgcgtggtgtggcccacctgttcgcgcacgtggcggattgcgccggccagatcgatgccgcgcgcggcgagcgccgccagatggttgtccttcatcatgaccgcgtcggacagtccgtagcgatggttgtggccaccgccgcagaccacggcgtatttctcgaacgggcgcaggccgggcgtggttttgcgcgtatcgacgatgcgggtgcgctcgtagcggcgcggccgggtgacgggttcgtcataatcgtcgccgtagatggcgttcaccgcgtccacgaaggcggcggtcatggtggcgatgccgctcatgcgctgagtgaagttgagggcgatgcgctcggcggtgagcaggtcacgtaccgggcctttcacggtggcgagtatctggccgcgctggaatcgctcgccgtccttgatggcggcggtgacggtgacggccgggttctgtgcggcgaaggctgcggcgaacacgtcgatgccgctcatcacgccgttttcgcgcgcggtgaggtgggccgagccggtttcgtccgcggggatggtggtctcgcaggtgatgtcgccgtagggcgcgtcttcggcgagcgccgcttcgacggcgacgcggatgatgtgtgatgtgagcatgggtcagtccttgatgtaggcgacggagtgggcccagttgtcgactggctcgctgtagtcggtgcgggcgtgggcgcctctcgactcggtgcgggcgagcgcggcggtggcggccacatagcctacggtgagcatgttgcggttctccaaagcctcaacgctgcttgcagcaccatcggcgtttacatcagcctgggcgtttgcggcggcgaggccttggccgagttcggcgatggcggttttcagtccggcctcgtcgcgcagcacgccgacgccatgccacatggtgttctggatgcgggtacgattccacaccttgtcagcggcggtatcgtcagcggcagccgtagcggcaggggcggccagcgcgatcggcgcatggtcgaacacggcaccggtggcggagttcaggaacggttcggatgcccagaccacgtcgtcaccgtccgcgacggcggccagaccggcgcggcgtccgtagacgagcccctcgagcagcgagttggaggcaagacggttggagcccatgacaccggtacgagcgcattcgccggccgcatacaggccaggaatggaggtccgggcgtccaaatcggtgcgaatgcctcccatgtagtagtgcgcggcgggcgccaccggaatcggctccttgctccagtcgaagccaagcgaacgcgtataggcgtcgatggtcgggaatcggtgggccaggaagttggccaggtcggggttctcgcgggccatcggcgagacgtcgagcatcacgggcttgccgccttgcgcctgcatcacgcggaagttctcgcgggccacgacatcgcgcggcgcgagttcggcgcgcggatcgatgtccttcatataccggtggccgtgttcgtccagcagcaccgcgccttcgccgcgcacggcttcggagacgaggaagtgctcgcccacggccatggcggtgggatggaactggtagaactccagatcggcgacctgggcgcccgcacgccatgcggcggcgaggccgtccgcggtggcgaccggcggattggtggtgtacgggtacatacggcccgcgccaccggtggccaagatcacccggttggcggccagatccttgtcctgcccgtcgatcagcaggtggacaccggcgatgtggccgtcccgcacgacgagatctttgaggaaggcgttctcgatgatgtggatgcgcgggttcttgcgcaccatggcggagacgtccagttcaaacactttgccggtggcgtctcccccggcatgtaccacgcgggcgcgcgaatgagccgcttccaggccgcgcagcatgtgtccatgcgcgtcgcggtcgaagtggacgccggccgcggcgaactcgcggacgcgctccgcaccctcacgggtgaggatgtccacggccttcgggtcgcacaggccgtggcccgcggccatggtgtcggcggcgtgcagcttcgggtcgtcgtcggagaagatggccgcggcgatgccgccctgcgcatgataggtgtttgattccaccagttcggccttggttaccaaggtcacgtcgtgtccggtaccggccacggccagtgccgcggacagtccggcgacgcctgcgcccacgacgacgatttcagtgttgctcattgtgttgctttcctctgtttttgcgtcatctgctcccctcagtccgctacgcggacagctcccctcatgtacgaggggcgtcagggatggatcacgggtgaacgcgcagcatgcgctccagtgccaccttggcttcgcgggcggtgtcttcgtccacggtgatgcggttgaccacgttgccggcttcgaggttctccaaagcccaagccaggtaggccgggtggatgcggtacatcgtggagcacgggcagaccacggggtccaagcagaacacggtcttgtccgggtactgcgcggccagacggttcaccaaattgatttcggtgcccaccgcaatggcggatccggcgggcgcgttggcgatctccttgacgatgtacgcggtggagccagtaccgtcggcggcatcgaccacctgcatcgagcattcggggtgcacgatcaccttgacgcccgggtatgccttgcgggcacgttcgacctgttcgacggtgaaacgctggtgcacggagcagaagcccttccacagaatcatcttggcgcgggcgtaatcggccggatcggcggcgccgccctgtgccttgaacggatcccacagcggcatctcgctcagcggaatgcccatggcgcgggcggtattgcggcccaggtgctggtccgggaagaacagcacgcgcttgccgcgggcgaacgcccattccagcacggcgtgcgcattggaagaggtgcatacgatgccgccgttgcgtccgcagaacgccttcagtgcggcggatgagttcatgtaggtgaccgggatgatctgctgcaagccatcggagtccggctgggtgccgcagatctcgccgagctggtcccagcattcctggccctggtcgatattggccatgtcggccatcgagcagccggcagacaggttgggcagggtcacgctctgttcgggcgtggagaggatgtcggcggtttcggccatgaagtgcacgccgcagaacacgatgtggtctgcgtccgggcgttcggtggcgttcttggccagctggaaggagtcgcccacgaaatcggcgtgcttgatgatctcgtcacgctggtagaagtggcccagaatcaacagtttggagccgagacgctgcttggcgtcggagatgcgctgctgcagttcctcgtcggaggccttgcggtattcgtccggcagcacctgctggcgcggcgcgttggcgggcagacggtcgagcatcgaggcaccgggaccgtagctgggtgtggtggtgtcgaagtgccatgggtcctgggtcagtcctgcatcgcaggtgctttgcgcgcccagcttggcgatgatctcgtcaacggacggcgcagtgaatagtgcggtcatagtggttcctttcctatatacgtctgtgatgccggcccgaagcgggtcggcgggaaaaatcagatgcgcgcggatgggatcagcgcgtcgagagcgtcttcacgctcgccttgtctggacagttccacgatgtcgtcaccatcggattcgtggggcgtaccgttctcgacaggtcgtttggggatgtagcggtagacggtggccggtcgttggcggccttcgcgcatcttctccccggtgtcttcaaggtcgcccgaggcaagcattttgcggcgaaagttcgccaagtcgaggggttcgccgccaatcgcctcatagacgccgtgcagctggcgcagggtaaacgtggggccgagcagtcgggtggccacgtcggagtattcgattttggagcgcaggcggagcagcgcgtagtcgatgatctggcgatggtcgaacgccagctcgggcagttcgtcttcggggaaccatcgtacgttgtcaccgtcctcgaagcccgcggcctcggtctggccgacgagcgcccagtacacgacggataccatgggcaatccgccatgggaccgggtcgggcctccaaaggtgtacagctgttcgaggtatcgcgggtgcaggtctgtggtcgattcgagggccgcgtaggcagactgttccaacgaccggtcggagcgcaggtcaccgccgggcaacgcccagcagcccaggaacggctgacggacgcgcttgaccaggggcaaccagagacgggaatgggccgagttcgcggcattgccggaatcggcggcactgttgccggtatcgccttccgggccgagtgccagaatcaccactgacacgccgacctgtggcggtgcgctgcggcgctcggacacattgccgaatcccatgccatgcctctttccataccggttgttctccctgcattgagagcatagcactacttatagtcacaatgaccataaatcacatatgggatggtccagcgcacgaatattggtcaggtagcgggccccaatcgctacgaaatcacgtccgtatcttccgatttcgactgtgtcatttcggcgacggacgggaggaacggcgctagggagggtagttcgtcgagactcttcagacccatttggtcgaggaagaattcggaggtgaccaagagggccgcgcgggattcggggtccacgccgtcttccttgataaggccgcgtaccgtgagcgagcgaatcacgccatcggagttgacaccgcggatcgcggccacttgggctcgggtgacgggttggcgataggccacgatggcaagcgcctccagtgcggcctgactgagtctcgcagtctggccgtcagtgacgaatgatgagacgaccggctcaaacgcggcgcgactggcgaactgccagccgcgagcggtgcggcgcagttcgaagccgcgcgggcggatgtcacgggattcatcgccctcatagtcatcgtgcagggctcgcaatgcctcttcgactgtgttgcgatccaatgccaaaatacgggccagctcggtggcggtctgcggctggtcggcgaccatcagaatcgcttccagacaggcgggcagcccgccgggaaaaacgtctaccgcgaaatccacgtattcggggtgcgtctcctccactcccctcaccgcggcctttgcggattcagccgtcgattcggcatccgccatgtgttcggttgtattcgttgcgtcaatccgttcagtcaccaatcgccgtccttacgcaaaatcgccttcggaaatgttcacgtcgctcatcgtttcggctacgccgggtacccacctcaggtgcagttcggcaaacggaccatcttgctgatactgcagcgcaccttgtttgaagaacacgagcacggccatgaaccgagccaccacctcaatacgagaagtgcagtcccgggtcaattcgctgaacgatatcgactggtcgcccttggattccaatgccgcgatcagccggtcgcgcaccaccagcgattgggcccgcagatcgaccaacggcacgtgcagctgatggatcgacacttcggaggcgggcgcgttggcgatgacctgggcggccagtcgggcgagttcgagcggagtcagcgtccataccagctcaggcagcatggcggcaacgccctcgtccatggccgccgggtgcgggaatcggccggagttggcggcgatacgcgcccggaagtcacctgcggcctgcttgtaggcgcggtattggaggagtcgggcgaacagcaaatcgcgttcgcgcagcacttcgaggctctgctcgtcgtgctggctgtcttcgccgccgggcagaatcgccacgcttttggcctcgaccagaatagaggcgatatcgagaaaggcgctggcctcatccatgttttttgtgaaatcgagcccgcgcacgtatgtcaggaattcctcggtgatcgaggagagggaaacttcggtcagctcgagtctgttgttggcgatcatgccgagcaaggcatcaaacggaccggaatagacttcgaggttgacccggaagccggaagtggcggattcctccgtgctgatttcggcttccgcggagctcccctcagcctcgctacgcgagccagcttccctcagagaggggagccgagaaagggaagtctcattcatcgtttatcgaaacaatcgttacgccacgatgccgcgagcaataagctcacgtgccacctcacggtattcctttgacgtcttgtgctcaggggcatagaccaccacgggcgcggcggcaaccgtggaatcgggcagtttgatggagcgggagatgaacgcgtggaacaccttttcgctgaacgcctcgtaaatgcgctggcatacctcttcgcagtgcagtgtcttggtgtacatggtgatgagcacgccgtccacttccaatgcgggattgatgcgggactgtactttttcgatggactgcatcagcagggccacaccgcgcaaggcgaagaattcggcggccacgggaatgatcacgccatcagctgcagcaagcgcgttcacggtgagcaggccgagcgatggctggcagtcgacgatgatgagatcgtattccgacttgagcttgcgcagcacgctgttcaggatctgctctcggcccacttcggtgaccagctggacctcggcggcggacaaatcgatgttcgccggaatcacatcgatgttctcgaatgcggtgtgctgcaccacatcatgtgggtccacggaaatatcgaacagcgcggtgtaaatcgtgttctccacggtattcgcattgacgcccagtcccacagtggcggcgccctgcggatcgaaatcgacgataagcacgcggcggccatactgggccaacgcaccggcgatattgatggagctggtggtcttacctacgccgcccttctggttgcacatggcaatgacacgcgccggaccgtgctgttgcagcggttcgggtgcggggaaggtttcgtattcacgtccaagcaaatcggtaggcatactgtctaccttatcaacatccgggttcgctgggggtgcaacgacatacgttcctgccataggcagcgttccttgacggaatgcgctgtctttatcgcgggtgtctcgccagtcgtccatcgttgccctcgccccctttgccgggaatacctgctcgcccatcctaatgtactcaccgcgctcgcctcggaacaccgttttgccgctggtattccagtgttccgaggtttatggatctcgtctcgtactatgtcgatgcgcttactcggtgcgcagtgcggtggccgggtcttgcttggctgccttgcgcgagggaatcaggccgccgatcagcgtgagcaccacgcttaggatcaccagcaccacgccaccggtcaccggcagggaggcattgacgtccgcattgccgatgaagtggtgtagcacggcgttgatcggaatattgagcagcacggtcaagcccacgcccaacaggccggagcataggccgatgatgccggtctccgcattgaacacctgggatacgttgtgcttcgaggcacccattgcgcgtaggatgccgatttccttggtgcgctccagcaccgaaatgtaggtgatgatgccgatcatgatcgaggagacgatcagcgagacggacacgaacgcgataagcacgtaggaaatcgcgttgacgatggtggtcaccgaactcatcatgagcccaacgtaatccgtgtaggtaatcttgtctttcttcgagacggtgttgttgtagtcggtaatcgcgtcggcgatgtggtccttgtcttcgaagctgtcagcatagatgttgatcgagctgggcgcgtcacgactcaccacaccgaatgcggcgaggttgtcgtcgtaggtgccggtcgacacgtactggtcgtagatcgcgacaagcacgtcgttcgaagccgtggcgatatacgcgtcgaaactgtcggcgagctgctgttcgctcatcgcggccatcgcggcggcctgatcgccggcacccgccgcaccagcggcacccgcagcaccagccgcaccagtaccagcggcgtccgatgagcccgtgccgtactgctgcccggcactcatcatcgacttggccatgttcgccttctgcgtcacgcccagcgaagccacgtaggtgcgcgcgtcggccgccttggtgacgtcgtccgagggcgagaacgtcatgccgttgagcacgttcgtgttcgggttggccttctgatcggtaacgatggcgctggagaccgcacggtcgatcaaatcattggtcagagcgcgcgtgtaccccacaccagcggccaacggtgtggccgaggcatccttcttcgccttgacgacgcccaccaccttgagtttggtggccgtttcgaggcgctgttcgatttcgtccttgtcgttgccgatgaaacggtagtggccgtcatcgtccttgacgtactggtcggatgccggaatcatgtacagcgtctgatcgagggccttagcatagtcgatcttgtcttgtggagtgctgaccttgtcgccggcgttgagcttggacatcatctcgtggtaatcggaggcgggcagcaggccgagctcgtacagcgtggtcagcggcacgctgttgttgtcgtcaagcaccagcaccacctcgtccttggacttcggccatgaaccgttgaccacctggtagttgtcggtgatgaccttgcctacgagcttgctgtcgtccgctcccggcatgatctcgttgaacgagtcgggcgcggcgttctcatcggttttgccggtcagcatcgacatctgctgcgaggtgatcgacgaggtgccggacatgccggacgagcttgtggacgccatctgcgaggccatcgaggcggagtcgctggatccgatcgtcacgccgtccgcattgaccagcgtgccgtcggggtcgtggtcgaacacggagaatttcacgtcatatgtgtactggatgccggtggaacccacatactggtgaatctcgctcttggaattatccagatatttcttgaagcgggtcaggttgttttcggtaatcgaactggtcaggctggacgcctgcttgacgctgcggtcgtccgggtagatgccgtcggttttgtgcgtcttgccgccgtatccgtcatcgccgcccatctggccgcccatcatgctgctcaggtcgaaggtctgggagtcgacagtgatcgggtaggcggtcatcgtgtcacgctggatgtcactgatgtatgtgttcacgccagtcgacaccgatagaatcagcgcgatgccgatgatgccgatcgagccggcgaacgaggtcagcagggtgcgcgccttcttggttttcagattgttgaagctcaacgccagcgacgtggcgaacgacatcgacgcgcggcccatcgtcttgtgcacggccggctgttcggccgtctcgtccacgacgaacgggtcggagtcggagcggatcacgccgtcgcgcaggttgacgatgcgcgtggcatattgttccgcaagttcggggttgtgggtgaccatgaccacgaggcggtccttggccacgtccttgagcaggttcatgatctgcacggacgtgtccgaatcgagcgcgccggtcggctcgtcggccagaacgatgtccgggtcgttgaccagtgcgcgggcgatcgccacgcgctgcatctggccgccggacagctggtttggcttcttgttgatgtgttcgccgagtccgaccttctccagcgccttgcgcgcacgttcgcgacggtcggccttgccgatgccggaaatcgtcagcgcgagttcgacattcgacagaatcgtctggtgagggatcagattgtagctctggaacacgaagccgatggtgtggttgcggtacgaatcccaatcgcgatccttgtattggcgcgtcgagatgccgttgatcaccaaatcgccgtcgtcataccggtcgaggccgccgatgatgttgagcaaggtggtcttgccggaacccgagggacccagaatcgcgacgaattcgctgtcgcgtaggttcaggctgactttgtcaagcgcctgctgaacgaaatcaccggttttatagcgcttcgagatcgatttgatctgcagcatgaatacctcttcctggctgacggttcgctgttatgtactgtattgtcacgccttgaatttccggccgactttggtgctcccccgccgcgattccgctatgggcggacgcgtcgcaaaatggtgtggctcaccgcgctctggggtgtgaggtcagatacgtttcgatcagggtttcagggcttacgtgcgtgtagatctgcgtggtggtcacgctggcgtgcccgagcagttcctgcacggtgcgcacgtccgcgccgccttggatcaggtgcgtggcaaaggaatggcgcaaggtgtgcggatggagtggtttggtgatgccggcccgctccccggttgctttgacgatttcccataccgattgccgcgagatgcgcttgccgcgtttgttgagaaacagtgcgcgcctctcgggaatcttggcgctggagcgctgttccaactcgccacgccccgcattgaggtatgcggtgatggcccggcatgcgtaactgcccaatggcacaagccgctgcttggagcccttgcccatgagtcgcgcgatgtgctcgtccaggtcgatgtcgtccagattcacaccggtggcttccgagacgcggcagccggtggcgtacatgaattcgagcagggccttgtcccgtaataccaccggatcggttgagccgccgactgccgccgcgtcgagcagacgggttacctcgtccacggtgagtacgtcgggcagggtgctggtgcctttgggcgccttgactgcggccgaaacatccgccgtcaccgcgtgctgaccgagcgcgaaacggtggaattcgtggatcgaggccagtcttcgggctttggagcgggcggactcccccgcctggtcaagggcggcgatgtagtcttcgacgtcttgtttggttatggcgtccggttcgtggatgccgcgggtttcgagccaatcaatgtatttggcgatgtcggattcgtaggcggtgacggtggccgtggcgagccctcgctccacgccgatgtggacgaggaactgctcggtgagtctggtgaatccgttggtcatagtgcccatggtacaaagaaaccccgctcggaagcggggtttctagtgtgaagtcacgacttcaagcaatcaggcctcgaccggagcgttgacgtcctcaggcagggcggccttggcggcgtccacgatggtcttgaaggtgtccgggtcggagacggcgatctcagccagagcgcgacgatccagctcgatgccggcgagatgcaggccctgaatgaagcggttgtaggtgatgccctcagcgcggacggcagcgttgatgcgctggatccacagcttgcggaaatcgcccttgcgagccttgcggtcgcggaagttgtagttaaaggagtgcagcagctgttccttggccttgcggtacaggcgggagcgctggccacggtagccggaagccctctcgagaacaacgcgacgcttcttgtgggcgttcactgcgcgcttgacacgtgccataatctattcctcagctttctaaagtcttgttatttccgggtaagccctatgctcacttctgcagaagctggtgcagcttcttggcctggccgccgcgcagcacatcgtcggcggacagttcacggcgcttgcgagcgggcttgtgctcgaggttgtggcgcatggcggaaccgacatgcttcaccttgccggtgccggtgatcttggcgcgcttggaagcggcggaattagttttcatcttcggcattgctgccctccttgctggtttgcttcttgtcggaagtcttctgagaaatcgcggactgcgcgtcggccgcggcctgagcctgagactcctgcttggccgcgagacgagccgcctggcgagcctgacgctcggcgcgggactcggcgccacgacgacgctgctcggactgggtgtgcaccttcttgcccttcggcgcaagggtcatgatgatgttgcggccctcctgcttcggcttggactcgacggtgccgtattcctcgacatcgtcggccagacgctgcagcagttccacgccaccaatcgggcgggagatctcacgaccgcgcaacatgatggtgaccttgaccttgtcgcctccgttaaggaagcgggtcacatggcccttcttcacgtcgaaatcgtggtcgtcaatcttcaggcggaaacgaatctccttgatttccgcggtgctctggttgcggcgagcttcacgagccttgatcttctcgttgtacttgaacttgccgtaatcaatgagcttggcgaccggaggcttcgcgttcggggccacctcgacgagatcgaggtttgcctccttggccaggttcagcgcgacggaagtcgcgatgacgcccacctgctcgcccttcgggccgatcaggcgtacctgcgggacgcgaatctcgtcgttaatacgtggttcgtcgctgatgatgactccaatcctctacttcaattccgtggcgagggcctttgctggagtcctgttcaatgctttgggttcatggcaagccaaagcccgcgccaatatgcgctcagcttctgcagacgcatatcagttctttgcgtcattcctgattacgcgttgtatatcgcaatcgctaggctgtttgccttgaacccgaggccttgaaaggcttccaggtggggttgccccgctttcttgatttctcaagccaaacagaaagtctaccatacgcccggacattcgcggcccgtgtgtcgaacctactgcacggcgcgcagcagaccgccgaagccttcgtctttgagaatctgccgatatgggccggcctcatcggcgatgatttgatcgatggcacgcatgccgagtacttcgaccggcgccttgtcgtcggtgagaatagtcgacgctgagtccggttcgctcaccttccggaatcgagaggcgacctcttccatataccattcgagatcttcgctgccggtgcgctcgtaggtggcctcacgcaggttgagcgccttggaggcctgctgcatggagttctcttcggagccggaacccggcttcttggcgaacagttcacggttcgtggtgttcggcacgtcggccgtcagtgtgttcccattgccgaacacgctggcgatggtatcgctcaacgcctcgttgatcgaaccttggccgtccgagatcatgttcatgttcaccaccatcacgccgccggggttcaggtgctctctgaccatggtgaagaactcggtggaactcatctggaagggaatggtgatgtcctgatacgcatcgaccatgatcacgtcgtacttgtcatgcgaggcggcgagccaggcgcggccgtcatacgtggtcacggggatgtcggcgggctcatcgaagtattcgccggccagatcggtgatcttctggtcaatctccacgccggtgatgttcattttcggataatactgcttcagctggcgggcgtaggtgccggtgcccatgccgaggatcagcgcggaattggcattgtcggcgagcgccggcgcagccagggccgtgtcatagtacatacctgtcagtcctttgtctttcatcgtgacggactgcacgccgaacagcacgttggtggacaggatcgtgcggtcggagaggttcttgacctgcaggtagttgtagatggactcgccctcataggccaggttggtttcccagaacgcgaagccggtcaggggcgagacgcaggacgtggccacgaagatcacggcgctgaccacgcaggcgatgcgcttggccttgatcgagatgaagtagatcagcggacatgccggagaagaattcggtgatgtagaggaatatcttcgatttgagaatcggccgctcgcttgcctcggtgatctgtgccatcgctccgctcccctgcctgtgcgcccatcgactactgttctgatgcgtagcctatcagcattttcccggccgatgggtggataccggctacagtaggcatcatgactcaggtatgcgtgatttttggtgcgggcgaatactatgcgggcacgcccgtggtgccggccggtgcgtatgtgattgcggccgatggcgggctcgaccatacgcgccagttgggcatcgtacccgatgtggtggtgggcgacttcgattcgctggagggccggccaccccgcaccgatgtgcgcaccatcgcgctgcccgcgttgaaggacgatccggacatgctctccgcgctgaaggtcggctggtcggcgggttgccgcgaattccatgtctatggcggtttgggcggccgcatcgaccatacgatttccggcattcaactgatggcattattggcccggcacggggcaagcgggtatctgtatggtgacgggctcatcgtcacggccatcaccgatggtaggctttcgttccccgcgcatccggtgcccgaggacggccgcatggtgtcggcgttctcccactccgatgtttcgcttggcgtgaacgaaccagggctgaaatacgagcttacagacggcacgctgaccaatacggtggtgcagggggtcagcaacgagttccgcgacggcgtggacgcggccatcagcgtggagcacggcacactgatcgtcaccttccccatcgaggtggcgttgcctcaggtgagtcgattccacgaatttggcggcgatatcggcgagctggacaccgcagtgtccaagctgctggttcgctgacttgcatgccgcgcgcttgctcatgatgattcgagacattcctccaaaggagaggaaaaatcacatgtcggttgcgggcaatccgaattgtgagcgctcacagaaaatacggcatttttgcccaaaacgcacgctgaaacgttgccatgtgtacagagtcggcattacagtagcaactgttggtaaacaatggcccggtgtgccaaagcgcgccaaggccaccctacaagggagaattacatgacagttaagattggtatcaacggcttcggtcgcattggtcgtctcgccttccgtcgcatcttcgagctgcaggctcgcggcggccaggctggtgacattgaagttgccgccatcaacgatctgaccaccccggctaccctggcttacctgctgaagtacgacagcacccacggcaccttccgtcatgacgatggcactccggttgacgtcaaggccaccgaagactccatcatcgtcgacggcaaggaatacaaggtctacgccgagaaggacgccaacaacattccgtgggtcaagaacgacggtgttgagtacgtgctcgagtgcaccggcttctacacctccgccgagaagtcccaggctcacatcaacgctggcgccaagaaggtcctgatctccgccccggccaaggatgacaccaccccgaccgttgtgttcggcgtgaaccacgacatcctcaaggcttccgacgtgatcgtctccgccggttcctgcaccaccaactccatggccgccatggtcaagctgctggacgagaagttcggcatcaaggccggcttcatgaccaccatccacgcctacaccggcacccagatgctgctcgatggcccgcgtggcaccaagaccggccgcaacctgcgcgccgccgccatcaacaccatcgcccactccaccggcgctgccaaggccatcggcaaggtcgttccgtccgtgaacggcaagctgcagggccacgcccagcgcgtccaggttccggacggctccgtcaccgagctgaccaccgtgctgaacaccgagaccaccgccgacgagatcaacgccgccttcaaggccgccttctccgacaccgactactacggctacaacgatgagggcatcgtctcctccgacatcctcggcgacacccacggtggcgtgttcgacccgacccagaccgacgtcaacaccattgacggcgtgaccctggctcgcaccgtgtccttctacgacaacgagtacggcttcacctccaacatgatccgtaccctgctgtacttcgctgagatctccgagtgaaccactgcggtctaggccgctacggttcgtttgagaactaagctgtgagacccccgccttgtgcgggggtttcttcgtagtagaacggtaatcatggcaaagaaaagcaagcatgataagggcgcgggttccactccggcgacagtccaactggagaaggcgggcgtggaattccacgtatacgaatacgagcactccaacgaccatatggatgacggctacggcgtggaggcggccaccaagctcggcttcgacgagcatcaggtgttcaagacgttgatggcggacaccggtgccgaacgcgtggtgggcgtggtaccggtgagcggtcatatggatttgaaagccttggctgcagccgtaggtgccaagaaggcctctatggccgatcccaaggtggcgatgcgtgaatccggctatgtggttggcggcatctcgccgttaggccagaagacacgtcataagactgtgttggatgaaagcgccctgcaattcgaccagattctggtctccggcggcaagcgaggcctgtctgtgggcgtgaatccacaggacctgctcaaggtcttgaacgccgttgccgcaccaatcggcacgtggtgaccgttcttggctcccctcacggaggggagccaaggatgactacttcttcctgcgcaactccgccggcagcacaaagtgcatgttttctttgatggtttcgacggacttcataccggtgaaacccattttttgtagagcgtcaatcacaccggacaccagttcgtccggtacggaggcacccgaggagatacctacggattccagaccctcgaaccatgccgggtcaagctcgctggcatcatccacgcgatacgctttgccgcgctcccccaagccttcctgcgccacctccatcagtcgcacggaattcgaggagttggccgatccgacaatcaccacgcaatcggactgctgggccaccagtttgaccgcagcctgacgattcgacgtggcatagcagatatccgaactcggcggctcttgaatccaagggaatttggccttcagcgcggcaatggtatcggcggtctcgtccacgctcaacgtggtctgcgagagcagcaccagcttggtgtcgggcgcaaaatccagcgaatcgacatccgattcatgctcgatcaagtgcacgtgttcggggctctcccccactacaccgaccgcttcatcgtgacctttatgcccgatatagacgatttcatacccctcgcgcacgaaacgcagcacctcacggtgcaccttacccaccagagggcaggtggcatccaccacatgcatgccacgacgttcggcttccgccttcactaccggagatacgccatgggcggaaaacaccaccggaatacccgcttgggcagcagcatccggaatctccgccaattcctggacgaacaccgcgccttgcccggccaagtcctcgaccacatgcttgttgtgcacgatctgccggcgcacatataccgggggcagcccatcctcgcgcgtccgctttccggaagcctccgcggctttgagaatggtctgtacggtaagaatcgcacggtccacacccgcgcagaagcctcgcggatcagcgagcacaacgcttttggtcatcggaacctcctgaacgtcaatagtgttttccagtgtaaggcagggattacaggaatctgccgtcacaacttttccgcgtctcccacgaatcaccaatttccaaggaatccacgtgcttctcgcatgatggtgtgagactcgtcactccacgtattgctaccgtgtttgtacgaattgtttattatatgccgcatatcgccaatccccgcctcgatagaggagacgcgctagactggggccagcgatagcaggagctaccggcccaccaacctcactacgggagtgattccatgacgagtaaaacaccacgcaccggaaatcagtattcgattcactatggcgattattccgccgtcatctgcgagctcggcgccaagattcgccgattcgattatcaaggcaaggaaattttctgcccgttcggcgtcaacgacctgacccccacctgtaacggttatgtgctggccccgtggccaaaccgcatcgaaaacggcgaatacgatttcaatggcaagcattactgcgcgccggttaacgaatatcatcccgaaccgcgcaacaatgcgaaccacggatacgcctaccactacatgtggaagcttgaatcgttgaccgatagcgccgtgacgctttcgctgcgcttccccaacttggacggatacccgttcgatgtgaccgtgaccgtcacctacgaactcggcgacaacggcatgaccgcgaccgtcaatgcccgcaatgatggcgacgaaccggcgccgtgggctctcggcctgcatccgtggctggccaacggcaagcagggcgcaactgccgccgaacgcgatgccgactccgccgcctgccacctgcagattaaggccgccagtcatgtgacggtgaacgaggcgctgattcccaccggcaccgaaccggttaccggtatctacgacctgaacgatggcccgacgctcgaaggccgcgcctttgatgatgcctgggtcgacgtggagcgtgccgccgatggtacgaccaccaccacattcacccgcccggacggtatcgaagtgaaaatcattggcgatgagacgattaatgcttggcagtgctacaccgccactggcgcaccgttcgccgagcatccgtatggcatcgccgtcgagccgatgaccgccccggccaatgccttccgcactggtgaccacttggtgacgctcgcccccaacggcgactacaccactgtggtccgctacgaagtagtccagaagtagttctgttacgctggctcccctccagaggggagccaattttttatccttatgtgccgccgcgtcttgggacttatgcgatacgattgtgagcgataacaatttgttccacaaaggagtgtgcactatggctttgaagcctcgcactggtaaccaatatgtcatctcgtccggcgaatggagtgccgtcgtcaccgaactgggtgccagcctgcgcgagctgaagtggcgcggcgaagacctcatcgtccccttcgacccgaacaaggtcattccctgctgcaacggctgggtgctggcaccgtacccgaaccgagtgaccaatggtcagtattctttcgatggcgaagactaccagatgccgatcgacgagttcgaccgccaatcctccctgcacggctatgcctaccgctacatgtgggagctcgttgatttgcaggaatcacacgtgacgctctcctggcgctcccccgacatcgccggctacccgtttgatatcaccatcaccgccacttatgcacttgacgagaacggtctcacggaaaccttcaccgtgcacaacaacgacagcgtgaaggcaccgtgggcatttggcatccacccgtggctggccaacggcaagcacgccaccggtcaggccattaccgccgacaacgagccctgccgtcttgagctgcactgcgacacccacgtgaccgtagacgaacacctgctgcccaccggtgaagagccggtttccggcatcttcgacctgcgcgataaccccacgctggagggacgtggcttcgacgatgcctggaccgatatcaccaaccgcggtgaagacggcagcacttccgccgtgttcacccgccccgacggcatcaaggtcacgctgaccggcgacaagaccatcaactcctggcaggtgtgcaccggcaacgaaatcggcgagaaggctcgtcaggccggcgtggccgtcgaaccgatgaccgcctacgccgacgccttccgcaccggcaaggatctggttgtgctcgagccgggcgatgactacaccaccgtggtcaccttccacgccgaacaaatctgaaaaaccgaatagccaagcctgacgatcatcgccacatggacacccgtgttgcatcacgtcgtgctcatgtggcataattccgaaggcttatttttttactgcagcaaaggagtccatcatgggcatgcgcggacgtaagcgcaagaatcgtcgtaagaaggccgccaaccacggcaagcgtcctaacgcctgattcttcgcgtttcttatggaacgctcaaggcccgtctgatgatacatcagacgggccttgttgtatatgtcgttacttatcttcgccgcagcagtgatcaagcgtggccttgagccgggctatcagacattcgggtgccacatccgggcgcaagtaggcacgcaacgcggcaatcaacgcctgttcacgctcgtcgcagcaggtacgggggtcaaaacagtcgccctccgtaacgatatgcacgtccgcctggaccgacgcagaggccgagccggtatccactgaacgatgatgcaccgccgtgatatgcacttcggtctggctgaccatgccatcggcccccgtacgggttatggagatatggcgagtacgctctaccggctgatcgttcatcagatctcctttcccgaaagcttgcttgactgttgtggcgtgcgggcgccagtcgcatgactatgtctcactgcggcttgcgtgtcgccattgctaccaacagtttgttcactacttccattatggccggaatcggcgattcgaccaacgttttcgcccaacttcgcggatggtgaaccagccgacgaaccagtcacgtacccgcgctctttcgcatacgaggcgagctcacgcttgagttgcgtgcgggcgcgattcaggcggctcatcaccgtgccgattttcacgccctgctcatcggccacctgctggtaggacttgccgtcgatggcggcgtcgatgaacacctgccggcgttccggcgagagtttggcgagcgcggccatgatttcctcgggcgcgaaggcgtccaaatattcctcttcagcggacttgagcccgtccgacgtatgttcggcggcatcgtaaatgtcccagtcgtcgtattcaccggtggagtcgttggcacgctgcgggcgccgcttggccttggcatactggttgaagtaggcattgcgctcgatggtggtcatccacgcctcgaagttggagcccggctggaatgagtcgaaggccttgaacccgcgttcgaaggtgtcctggaccagatcctgcgcgtcatcgggattgttggtcagcctcatcgcctgccggtacagtgcattgacggcgggcatggcgagctgttcaaatctggcgcgcttggctgccatggactcgcccgatccggctgactgcccggattgcatagttgcttcgcttgtcgtcacgtttcaccattctaatcaaatcatgtgcccatatcgtggtcgatgacgtgtgagccacaacacgctgcaccccacctgtagaatggcgtatcggctagataatagggagtaacaattatggctttgactttggcttcggccgctgacctgctcaaggaacaccatctgctgcgtgaaatcatccaaggggatgtctggaccgacgacccggcccgtatcgcttcggcggatgagccgttcgccggcatcacctacgacacccgcaaggtcacgccgggcaccctgctgtgctgcaagggccagttcaaggccgaatatctgaacggcatcgacgaagccggcctggccgcatacgtggccgaaaccgagtactcagccgcaaccgccgcccccggcctgatcgtcaacgacgcacgtaaggcgatgagcctgctgtccgccgcgttctacggatatccgcagaacgagctcacggtcatcggcgtcaccggcaccaagggcaagacgaccacctcgtacttcacgcaggcgcttatcaacgccgtctccggcggcaaggccgcattgttctcctcggtcgataattgccttgacggccacacctacgtcgaatccgatctgaccacacccgaatcgatggacgccttccgcatgatgcgcgaggcggccgataacggtatgaagtatctggtgatggaggtctcctcccaggcgtacaaggtggaccgcgtctatggcctgactttcgatgtggccgcgttcctcaacatctcccccgaccacatcagcccgatcgaacaccccacgttcgaggattacctgtattgcaagcgccagatcatcgtcaacgcgaagtcgctggtactcggcgcggacagtctgcacgccgatctgttgcgggaggacgcggaggcagccggcatcggcgtgaccaccttcgccctgcatgacgcggataatgccggcaccagtgcggacgtcgtcgcctggcccgccgacccggcgcacgcctccttccacatcgccgacggagatcaggcccttggcgactaccatctgtccatcgatggcgacttcaactacctcaatgcggcggcagccatcgccatcgcccatgcggttggcgtatcgctcgatgacgccgacgcactgcacgccatcgaatccgtacgtatcgccggccgtatggaacagttccgcgacccgcagtcaaacacgctcgccatcgtcgattatgcgcacaactacgcatccgtcaccgcgctgcttgacttcgtctacgagcgttggggcgaggaaaacccgcgtatcacgctggtgaccggatcggccggcaacaaggcctacgatcgtcgtaaggaaatcgtcgaggctgccgagaaccgtatcgcgaacttcattttcaccgccgaagatacggacaccgagccgatcatcgacatctgcatggaaatgcaaggctacatcacgaacaaggatgtggtctccacggtgatttccgaccgtctgacggccatcaccaacgccatttacgatgcccgtgcgcacgccgaccgattcaacatcctgctgatcatcggcaagggcaacgagcgttggatcaaggaccatcgcaagcatgtgccgttcgacggcgacgatcacgtcgtcgaacgcatgtttggcttgtgacgggattccggccaatcaaatcctgatcggatcccgattggtccacatcagatcacgcgcaatacgaccaaaccagaaacacgacatacggatacaaacgaaaaaggatagctgaatcgtaatgatcacgttggagaaagttgacggagccacactggaagccgaagccgagaaggccggcatcacgttgcctatcgaacagaccaaggtttggtctggttttcaggcggatatcgacggacgcacaccatggggcaattatctgatcaagcgtgatggtgaattggtcgccgtgatctcctttatcgattttgagacgcacggttatcattatctgcgctcgatgcatgggccggcgtgggctgccaagcccaccgaggctgaggagcgcgaggtcgtcgacgccatcgtggacaccgtcaagaaggccgacaagagcatcgcgttcctgcgtatcgacacctggttcgccgatggtacggagaaggtgctgtccacagtgccgtacgaccagaccgtggtcatcgacatcaccggtggcgatgatgagattcttgctcggatgaagcgtcgtggacgccgtgacgtgcgcaagtctctacgtgaatgcccggccgaggttgccgatgagacggataaggccctgaccgatttctccgaatattacgatgtgatggtcgaaaccggccagcgcgatggattcacgcctgctccgatgagcgactactccgatatgatcggcgcgttgggtgccgatcattgccgtgtgttcgccgcacgtattgaagaccgtgtggtggcatggtcgattgtcaccgtgaacggcacgcatgcggtgcgctactatgccggcatgcgcaacgaggttatgcgtctgcatgtgaccgacaagctgctgtattccgaatgctgcatcctgggctcgcagggtattacggaatacgatctgatgggcatcggctccgatttcgcgccgtcgctcaaggggcttaacgagttcaagtgcaagttcaccgaggaaatcaccccggtggcccccgcccgcgacgtacccatcaagaaggtcttctacaagacgctgcagactgtgcagggcgtgcgcaaggcattacgctaataccaccccgctcccgctggtgggagctgtcgagcgaagcgaaactgagggtggtctttcgagatggaccaccctctgtcacctgtggcgccagttcctaccagcaggaaccattcatttatcgttcgagtttttggctcaccacggctgttacgccgtcggctcgcatggttacgccgtagagcgcgtcggcaatcgacatggtgcgttgctggtgagtaataatgatgagctgcgcatgggcgcgtagctcattgaacgcattaatcaaacgggtcaggttcacgtcgtccaacgcggcctcgacctcgtccatcacatagaacgggctggggcgggcggtgaaaatcgcgaacagcaacgccagcgcggtcagtgaacgttcgccgccggacaggaggctcagctgtttgacgcgcttgccggccgggctggcctcgaccagtacgccggtggtgagcatgtcttccgggttttccaagcgcagtcgcccggtgccgcctgggaacagcgtggcgaacatctgctcgaatgcctcggcggtatcgtcgaacgcggatttgaatacctggaccatcgtggaatcgagatccttgatgagctgcatcaaatcgtcacgtgatttgaccacatcgttgcgctgatcattgagatacttgttccgctcctcaagcgcttcgaattcctcggtggccaaagggttgatcttgccgagtgcggccagatcgcggcgagccttatcgagacgcttcttctgctcctgacggttatacggcacggtcttaaagcgggcggaatcgccgttggtgccggtctctcccccggtttctccctcttcggtctcagcctcagcttccgtctcatccaacggcacagggtcgccctcatcatccagcacgggcaccggctgttcggggccgtaatcactaaccaattcctccaaagtgagaccgagttcgtcggacactttttgcatgagctgcccggattcggcggctaaccgttcgcggtttacatccaaggcatgttcgcgcccggtcagatcggtgaccttgggctcgatctggttgcgctgcgcgcgcagggccttgagttcctcgtcatggctggaggcggcggcctgcagctcgtctcgtttggcggccacgtcatgcagcgtatgctctaccatggcggccactgctcgcgcgtcatcggccacgccttgcaggtgtgcggcctgctcgcgtctgcgatcgttcaacgcctcgatgcgggcgcggcgttcggcggtttctttggcgttgtcccgcagcagcccggcctgtcggctcagtgactcccctttgcggcttgcttcggtccacgcgatttttgcggcgacctcatgctcgcgagtcaggttcagttcgcgctccagcgtgcgttcgcgttcatcgagttcgtcgaaatcggcatgttccgctgtggattgctgggccgatgccaaagcgcgattgaggtcgtcaagcttgagctgatgctcgttgcgattctcttgggtctcggtgattttcctatccagctgctcgagctgacgggtgaacgatgcgacgcgatctgtggcggatttcagagatttctccgcctgttgggctttgagccgggcttcggtgcgtttggcggattcctggtcgacgagtcgagccgcttcatcgcgcttggttttggcctcggccacttgctcagccattccgccgtcttgggcggtcaactgtttgacctgtgccaatgctttgtctcggcgggcggccagagacaggtccgattgagagattgaagagccgccgaccgccgccacgccgtgtgtgaaggtctcgccgttcttggtgacggcccgcatggcttcgccgaatgccacaatctgttgggcttcgtcggcggtgccggccgcggctacatcagccagcaggagacgcacggtgcgcacgaccgcttcggcctgtgccgggttctcggcatccgggttcgcggtgacgagtgctgccagcgcgttgcccgattgcggggcggcctccgcgttctcggcgctactctcctccgactccgtgcccggctctgtggcgggatcgccggcaatgctcgcggtcagcaccacggctttgccgagcttatcttcccgagcgcgttcgagggcgtgcaacatgttgcctgccgcgggtaccacgatggcgctggcatactggtcgagcgcgtgggccacggcttcttcccagccttcggccacatggatgaagtcggtgagtcggccaagcgaggccacgtccgtatcgcgctccaacgatccggaggcattgcggctgtctagcgtgtcggcaagcgcatcggccttggatttgagcgagatgatcttggactgtatctcgcgctgcttatcggcgcgttcattcagtcgttcgcggcattcggcgagcgttgcacgcgcggagtccaatgcggcaccgtcatcgtcggcaacggagtccgcttcgctgcgcaatgcgtccagctgttgctgggcatcgtcgcgctgggaaaccagcgagtcgcgttgggaggcgtaatccttggcgcggctggtcgccagttgcacggcggattcctcgcgggcgatgagttcgcgcagtcgggcgatttgcgcatcgcgttcctgtgcggttttgcgcagttccgtcaaggtctggcggactgaggcaagctttttctcgtcgtcggcgcgttcctcggtagccttgtcgagtgcgatgcgcgcatcggccacggccttggtttgtgccgcggcctgagactccagttcctcggctcgtttgacgagcatgccgggatcctcaccgaagttggtgacgatctggccggcgagtgaccggctgcgctcttcggccaactgggcgagcgcgttcagtcgttcacgggtctgcgagaattcatgccagtattggttggccttggcgatggccggactggattcggagctcaacgcctcgacctgttcgatgcgtactttgacttgggcgagttcacgttgggcgacggccagctggttacgcacatcgccaagctcttgacgtaccgtgtcgcgacggctcatcgagcgttgagcgtcttcggcgtacaggcgggcttgggcgtcgcgtacggatatctgaatcgcgtcggcgcgccgggagatgcgtgcctggcgtccgagggggccgagttggcggtgaatctcccccagcaaatcgtcgagtcggctcaggttcgtttcggtattggccagcttgcgcaacgcgcgttccttgcgcttgcggtgcttcaggatgccggcggcctcttcgatgaacgcacggtggccggacgggtcggccttcagaatcgcatccaatcgtccctggcctacgatcacatgcatctgctggccaagaccggtatcggagaggagttcctgaatgtcgagcaggcgacattgcgagccgttgatcgcgtattcggagcccccgttgcggaagatggtgcgggagatggtgacttccgtgtaatcgatatcgagcgtgtgatcggaattatcgatagtcaggctcacctgcgcacggcctaatggcgggcgggaggacgtgcctgcgaaaatcacgtcctccatcgaagtgccgcgcaggtttttggcgccctgctcacccattacccagatcagggcgtcgacgatgttcgacttgcccgaaccgttggggccgaccaccgccgtgatgccgggctcgaagcgcagcgtggtggcggaggcgaaggatttgaatccgcggagggtgagttccttgagatacatggcgtgagactgttttccgtatgccgggtgtccgggtatccgatatgccttggatgcgggttaccgggcgtcggcggaatcgtcggtgtcggtgtcggcactggccgtgccggtgccggcgtcaccggcgtcaccggcctgttccttaccgaggccgaggacgtcgaacacgtcgaagtcgtccgggcttaccgaatcctcgaggttgtcggcggcctcatcctcggccttgtctgccggctgatccgaatcgtccgggtcaaccgccggctgatgaacggccatagcctgcctcatcgtggggctggcgtgttcctcaagcatcaggcgtgcgtcgccggcggtgacgaagctgccgcagataagcacgccgtggccgtagcccacgcccagctcgtcctcggcatcgaccatattgacggcggtctgaatcgcgtcaggcaggttcgcttccttgatcacacggtcacgaccgaacacgtccacggcaatcttctcgagctcgtcggccggcatcacgcgctcgcgccacgagttctcggtgaccaccacggagctcaggatcggctccagaacacccagatattcctcgacctgcttgtcgcgcatcatggcgaccacaccgaccagctgcttgaagtcgtagctttcctcgatggccttgcgcagggcttcggcggcattcacgttgtgtccgccatccagaatgatggtcggtgaggtgcggatctgttcgatgcgtccgggaatcttgaccgagctcaacgcctcggccaccaagtcgccgtccagcgggccgttgaccggaatcaccacttcggaggcggcgagcgcggcaagcgcgttgtgggcctgatgctcgccgaacttggcgatcggcacgccctcgtaagtgccgttgggcgtggtcagggtggcgacttggccgccgactgcggccatgcggtcggacgcggtcatttcgtagccgtcgcgcacgagcatggcgtggttgcgttcggcggcttcggcgagaatcggcatgacggcttcctcatgcggctgcgggccgatgatggcggtgcagttcggcttgatgatgccggccttctcggtggcgatctgttcgacggtgtcgcccagccactgcatgtggtccatgtccaccgggccgatgatggccgcatccgcgctgagcacgttggtggcgtcccacaggcctcccatgccgacctcgacgatggccacgtccacgggcgtgtcggcgaacttccagatggccatggcggtgagcacctcgaagaagctcatcttcggcttgccttgctcctccatcttggcgtccaccagggccacgagatccttggtctgatcccagatgtcgatgaaatcgtcgtcggacagctgctggccgtcgatggcgatacgctcgttgatcttctccagatgcggcgacgtgtacaggccggtgcgcataccgtaggcgcggcagatggcctcggccatgcgtgcggtggagcctttgccgttggtgccggtgatatgaatcacgcggaacgactgctccgggtggcccaggatgtcgagcatcaggttcatccggtcgagatccagattggtggtgttatgctccggcgggcggctcatgatgtccagttcgacgtcccgcatgctctcattgttccgattcggatgctcgaatgacatatcctcttctaacctctgctcgtgttgctgttgcaccgttcggagtgcgtatgccacttacgtgttcgcgccattctcgtcatgtctacgcatgcccgcatatattccgcttccgcatgcgcaggaagctccccttgcacaggtttgccccgcatggttcgggattcttgccttcacgcgtggagccgcactccctcaattccctctatcctagccgccggggtggtttatcgtgcgcgcacagtgaaaccgtctcatatgtcgccgccgcgcgggcagtctctacctgcagccacgcacagtgaagccgtctcatatagttgcaatgcggctcttgccgtcggcatcccattcttagtcggctgcaatccaaaacttgtatgtccggcgacgctgatgctattcagcgtcggtacagtgccagcttctggcggtacaccgacgctatgatgctcttgcgagtcggtagctggccaaaacctggattaatcccgactccatcgcctctcagtgtcgtctcctcgccaaggcatgccattctgccgtcgttgagaaatttcaacgtcgtcaatcgaccatgtcttgccccggaaacgactctcacaaacgtcctctacatcatcttttgaactcgcagaggctcattcactgttatgactgctctcaccgtcggcagccgtccaagccctggatctatgccgccaataaattgcagcaaatcgtcggccacgatacaaccattggactcacgccgacgctagattccacactcagacagaagccagccaatatctgaaccagcaccgacggcgtacaaagcataagcaccgttaaccgtcaattcgccgccctctaccagctacatccgccttcgccgatgatatcttgttcgaatccccaaagcacgttgttcgaatgacattactgatggtggataagttttgtatgttatccactattccgaattagcggcctaataccttgaaatcatcgggagtatctcgctccaagacagccaagctccgaggctagaaccacaatggctgaaattcatacttacgctgcttcgttccggctacgctcgacgtcatgaagacacacaaagcagtggcctcgctcatatcagccgcgcagaatgagctgagatgcgtctattcaagaaatgaagcggaacagaccgctctacgccgccgtgcccagagtggtgagttgttgaaagtgtatgacggcattcccagtctttatgcaaatactgcatactgggatggtttgacgccgccggagcgaacgttgcacatggcccgcgctcttgcgcaagagcatcctcagtgggtttttggcggcttggtggcagtaagtgcctatggattcgaacatcaatggcatttgcatgatgactgcataaccatcgtgacttccgatcatggatctcgtcaatgccatcagcgcttacgacatgtctatatgcccgatatgaacaatccgaagacacattacgaggcctccggcctatccctgatatcaccggctagaaccttggtcgaggccgctatagaccttgattttcggtttgcgttgccgatctttgactcggcccttgccaagggaataaccaaggaagagatagccgccgactgcgttcaatggagaatcgattatgcccgagtattccgcctgctgcgctatgcaaacgaaaggagcgagaatggtggagaatccctcgcgcgaggcaccatcatcgaaggtcgcttcctcacgccgcgtattcaggtaacggtgaccgacccacagacgaataccgagtaccgcgttgatttcgtatggaagctcgatgacgggcgcgtgatagtggccgaatacgacggcacacaaaaatacgtggacccagccatgaccgataaccgcagcattcaggaggtggtggccaaggaacgcgcacgcgacgagggactgaaacgagccggtgccaccgaaatcgtccatttcacatacgctgacgtcatcgaacgcactccgctgcgggtaaaactgatcaaagccggggtgcctcaggtggagacctccgcatagcagtgagtcccgcgacgcgataaaccttcatcgcatgggttcacatggattcagcccgcagaatatgtcaatatcaatcggcaagctccagcccaagccaatgcccctctccttccctgccgagaacaataaacgggcccgcattccagcccgccgcactcgccatatgggcatgtccggaagaccgtccaaattccgtacttggttttaccgtcagccgtcaatcgtggcacatcgcataaagccgactaatatgaggtgggaatcgatgattcgacaacaactacatacaggagagtggcaatgggtgaagtgatcaccgccaaggacaaggaatatgaggccgaagagcgcgctacggcaccgggcgcgaaccagtcgatgagcgaccgcgtgaacaaccgctcgctgcgcccgcagtcggccgcattcaaggagttcatgaagtccggctgggccgacgatgatccggagatcaatcctctcgaatcctccaagttcacgccagcccgccttgaggcgctgggcaaggccttcccgggcgaacgtctggtcattccggccggccagccgaaggtgcgcaacaatgattgcgattacatgttccgcccggacaccacgttcgcctactacaccggtctgggttccgattacgaggccggcgccgtgctggtcctgaacccggtcgaccccgactcccccgaagccgccgccggcaagacgcacactccggaactgttcgtggcgccgcgcgccgacaactccaccgaggacttcttcatgtccgcccactacggcgaatactgggttggcccgcgtgccggtctcaaggagatgcaggcgatgaccggcatcgaaacccacgacatcgcccagctggccgacgccctgtccaaggacgtgggtgccgaagccggcgccgtacgcgtgcgcgtggtcagcgaaaccgacccgcaaatcacttcgatggttgaatccatccgcgaggccaacggtttcgccgatccggacaagaactccgcatccgacgacaagctgcacgagttcgccgccgaggcacgcatggtcaaggacggctacgaaatcaacgaaatgcgcaaggccgtggacgccaccaagcatggcttcgaccgtctgctctccgcactgccggccgcgctcgacaagccgcgctccgagcgtatcctcgaaggcgcgttcaacgccgtgtcccgtgaactgggcaacgccgtcggttacgactccatcgtggcctccggcccccacgccccgattctgcactggatgcgcaacaccggtgtggtgaagaccggcgacatgctgctggtggatgccggcgttgaggtcgattccctgtacacggccgacatcacccgcaccttcccgaccaacggcaagttcaccgacttccagaagcgtctgtaccaggccgtgctcgactcgcagcaggccggtttcgaagccgccaagccgggtgccacctactccgacatccaccacgcctgcatgcgtgtgatcgccgagcgtctgcacgattggggtctgctgccggtgagcgtcgaggagtcgctgtccccgcaaggccagcagcaccgccgttggctcgcctgcggcgtggcccaccacctgggtcttgatgtgcatgattgcgcgcaggcccgtttcgagtcctatcagggcgcgccgattcgcccgggcatgatcttcacgatcgagcccggcctgtacttccgcgaggatgatctgctgattccgccggaataccgcggcatcggcatccgcatcgaggacgacgtgctcatgaccgagaacggccccgaatggatttccgccggcatcccgaagcagatcgacgacgtcgaagcctggatggccgagcaggctgcccaagcgaagtaacctaagctccctctgatgagggagcttcttttctactaaggaggcaatgtgtccactccggaatttgtgttggaattgcgtaagaagatcggccatgatctgttgtggctcaatggcgtgaccggttgtgtactgaacgaacatggtcaactgctgttggggcgtcgttcggacacgggcgaatgggcgatggtctacggcatcaacgagccgggcgaacagccggcggacacggtggtgcgcgaaatcaaggaggagacgggcatcgatgccatcgtcaccgatttggtggccgtcacctcgtcaaacaaggtgctgacctacgccaatggcgacaacaccatgtacatggatcattcgttcctgtgcgccctgaagcccggcggcaatgccgagccgttcgtgggcgacgaggaaagcctgagcgtcggctggttcgatctggatgacctgcccactcccctagcggccagcacgagcgagcggctggagctgttccatacttacatcgagaacaaaaagcacggcgacgcccacgccctgttccagttcgatgggcagcagtactagcggatataaagttagctccctctgacgagggagcttcaatgctatgcgattacgcctcttgggctaggagctcgtggaggtgggcgcggtgttgctgctgttcgcgcgggtcgggcacgggcagggaggccagcagcttcttggtgtacgggttctccgggtgctgcataatctggtcggcatcgccgtgctccacgatctggcccttatgcatcaccatgatgcggtcggcaagcatatcgaccaccgccaaatcatgggtgatgaacaggcacgcgaagccgatttccgcctgcagtcgcttgaacagctccaacaccttggcctgcaccgacacgtccaatgcagaagtcggctcatcggcgatcagcagcgacggcttcaacgccaaaccacgcgccaaagacgccctctggcgctggccgccggacagctcatgcgggaaacggttcatgtaggcgcgcggcagctggaccatctccagcaggtcgcccacatagttcttggcatcggccacggaaccgtacttgtggtgcacgagcagcggctcggccacattctccgcgatggtcatcagcgggttgaacgaggagcccggatcctggaacacgaaaccaatgtccgcgcgcttgggcttgaagtcacgctccttgacgccgttcatctcgatgccgagcacgttcagggagccgccggacaccttctgcaggccggcgatggcacggccggtggtggacttgccggaaccggactcgcccaccaggcccagcacttcggagcggtggatggtgaagttcgcgccgtccacggccttgaagtcgggctgcatgagatggcccgggtacgtgatggtcaggttcttggcctcgacggcgatcggctgttcgcgccaatcggccttgcgctcgatcggtttgccctcgcggtcgcgcacgaccagcttctgaccgatgcgcggcacggcacccagcagtcgcttggtgtagtcgtccttcggatggtagaagatctgctccacgtcgccctgctcgaccacgtggccgcggtacatgacgaccacctggtcggcgatgtccgcgatcacgcccatgttgtgggtgatgatgagcacggaggcgtcgaactcgtcacgggcgaggcgcagcaggtcgagaatttcggcttgcacggtcacgtcgagggcagtggtaggctcgtcggccagaatcagaccggggttcagcaccaacgccatggcgatgacgatgcgctgcttctggccgccggagaactggtgcgggtagtagtccacgcgggtttcggcatccgggatgccgaccttcttcaggatgttgatggccttggcgcgcagttccttcttgtccttcatgccgtgggcgcgcaggccctcttcaatctgccagccgatggtgtacaccgggttcagcaccgaattgggctcctggaacaccatcgcggcctcggaaccacgcacttcgcgcagctgttcgccgctcagggagagcacgtccagcgaatcggagccatcgcgcttggacaggtagacggcaccggaggtggtggccgtctccggcagcagcttgatgatggagcgcgcggtcacggacttgccggaaccggattcgccgaccacgccgaccacggtcttgcgcggaatggtgaagttcacgtcctcgacggccttgatggagccggcgtcggtcatgaaggagacggacaggtccttgatatcggcgagattcttgttgttttcgctcatctctcactccttgccttccggcttgccctcgccggtccattcggaggcgacgatggtcgggtcatggtcggtgacggtggccggcgggtcgacgttcgcgtcgagttcggcaatcacctcgttgcgtgcggtcggcttctcgtttgggtcgacggacgtgtcttcgatcgatccgaccacttcgccggcggacttgcgtgcgcgcagacgcgggtcggccagatcgttgagcgattcgcccacgagcgtgatgccgagcacgatgagcacgatggcgatgcccgggaacacggcagtccaccagatgccggcggtcacgtcggaaaccgagcggttcaggtcgtagccccattcggcggcggcggtcggctcgatgccgaagccgaggaagcccaggccggcgagggtcaggatggcttcggacgagttcagcgtcaggatcaccggcaacgtgcgggtggagttcttgaacaggtgcttggtcatgatgcgccaggtggaggcgccgaccacgcgcgcggactcgacatacgcggattccttgatgcggatcacttcggcgcgaattgtgcggaaatactgtgggatgtacaccacggtgatggagatgccggaagccaggatgccgctccacaggccggactggccgtgggagatcatgatggccatcagaatggcgagcagcagcgaggggaaggagtagatggcgtcggcgatcattaccagaatgcggtccacccagccaccgtagtagccggacaccagaccgagcagcacgccggcgaagatggagagcagtacggccacgacgatggcgatgacggcggtgcgggcaccccacaccacacgggagaacacatcgaatccggcggcggtggtgccccagatgtgttcggcggagggcgcggcctgcgccgggaaggacgtgccgtcggcggccttgatctgggcgtggccgtagggggcgatcagtggggcgaagagggccacgagcaggaagaacgcggtgatcgcgaggccggtgatcagcatgcccttctgccagccgaccgccacgcgcagttccttgatgattggaatcttggtccagaacggcgtcttggtgctgacgttgagcttggtgaggcggtcgtcaccgggaacggtgatcttgtcttgggatgtggtggtcatctcagtacctcactctcgggtcgataagcgcggcgatgacgtcgacgaggaagttgacgacggccacgatgatggcgataaggatcacgatgccctgcacggccacgaagtcacgggccttcaggtactgggacagcatgaagcccaggcccttccattcgaaggtggtttcggtcaggaccgcaccggcgagcatcagggcgatctgcatgcccatgacggtgatgatcgggatcagggccggtcgccaggcgtgcttgttgagcaggcgcttttcggagacgccgcgcgagcgggcagcctcgacgtagccggaattgtaggtggagatgacgttggtgcgtaccagacggatgaacacgccggcggtcaggaggcctagggcgacggccggcagcacggcgtggcgcagcacgtcgacgagcacgttcatgtcgccgagctggatggcgtcgatgatgtagaagccggtcggcgataccagacgggtgaactgcatttcggagttcaggtcggagcggccggaggctggaaggatgttgagccagacagcgaagatgagcttcagcacgaggccgaggaagaacaccggggtggcgtagcacaggatggcgaaggtgcggatgccggcgtcggcggcacggtcgcgtttgcgggcggcgagtcggcctaggccgatgccgacaatcagcgccacaatcagggcgaggaaggccagttcgaatgtggcggcgccgtagtgcgtaagaatgctgatcaccggctggttatcggtcagcgtcgtgccgaggtcgccgtgcagcaggccgccaagatagtcgacgtattgcacaatcagcgggcggtcatagccggccgcgtggatgcgctgctggagttcggcgggtgtcaggcggccgcccaaggcggcggaaatcgggtcgccggtggcgcgcatcacgaagaacacgatggtgaccagaatgaaaacggtgggaataatgagaaggaacctcgtcagcacgaagcggaagaaactacctgacagtcggttcttcttcgtcttggctttcgccggagtggtgctggaggtcgctatggcgctgtctgacacgcgatgctccttggtgttggtaatcggtatataaagcaataaaggctcccctctccgaggggagctggcggcgaagccgactgaggggagtcatacgagttgggctcccctcagtctgccgtcggcagacagctccccccctcaaagaggggagctcatgctgaatcagcccttggtgacggaggcatagcggaagcggaaggaagcgtcgagggtgacacccttcacggaggtgccggtgacggcgacctgggcaccctgcagcagcgggatggtggagaggtcttcggtctcgagcttctgaatctgcttgaggatgtctccacgagcagactcgtccttctcgccggcctgcttgacgatcaggtcgttgacttccttgttggagtagccgttgttcacgaagttgccatcgcggaagaacggggacaggtagttgtccgggtcggagtagtccgggaaccatccaagctggtagaccgggtacacaccgtcggaatcgtcggtaaccacacgatccttgttgtactgggtccattcggtagactgcatgtcgaccttgaacaggccgcctgcctcaagctgggacttcagggcagcgtattcgtcggcggagacggagccgtagtggtcgctgttgtactggagcttgaggtcgaccggggtggtgacgccggcgtcggcgaggaccttcttggccttctcggtgctcggcttgccgttgccgtcgccgtaggcggacttcagcgtgtcatcgtgaccggccaggccgtccgggatgaaggagtacatcggggtgtaggtgcccttgtagaccttggtggagagctcttcgcggtcgatgaggttggcgacggcctggcgcacggccttggccttgttggcgtcggcgtcgggctgggattcgccgtagggctgaatcttgaagttgaaggcgatgaagcgctcctcaccgcccgggcccttgacgaccttgaccttggagtccttggagaggtcctcgatgtcggtcgggctcagggagcggttggccacgtcgatctggccctgctggacggccatcttcaggttggaggcgtcggcgaagtacttgacctgcacggcggagttcttggccggggtcaggcccttgtaggagtcgttcttggcgtaggcggcggactcgttgatcttgaaggcggtcagcgtgtacgggccggcaaaggccttcttggagacgatggtgtcggcgtcggtgagcttgtcggcgtcgaaggtatcctcatcgacgatcgggccggcggggctggacatgacctgcttcagagtcacgtcaaaaggcacggaatccttgaacaccacggtggtgtcgtccttggcggtcacggattcgacgttggcgagcagggagctcgggccgttcgggtcgttgatcttcttgatgcgatcgtaggagaacttgacgtcggaagcggtcaggtcgttgccgttggcaaacttcaggccgtccttgagcttgacggtgaattcggtgccgtcatcgttccaggtaccgtcatcggcggcgatgtccgggctcagttcggaggtgttgtagtcctgggcgtacaggaacgggaacacctggatctgcacggcgtatgaaccgttgtcgtaggagccggcggggtccaggctggtgatcttatcggtggtgccgatggtgatggcgttgccggaatcggcacctgcggtggtgtcatccttcacaccgccgcaggcggtcagggatgcgatggcggccacggagacggcggcggccagaatcttcttggaattcaacaggaatcctctctcataacttgtttccacgtcatcactgcgggcgtggattaccgcctgactatggtgcggatgtgttacctctgcgtttccatagtcatcgacttatgtttcgcttgtggcgaccaaggccggttttatgcggtatcgagcagtattacggattcttgtattacgacgtgaataacggtcacatggtgagacaaatatactatcatctcaccatgtgaccatgttcgtagacgaatgccttccattcgtcaaccggtcggcctactgctacttgagcttgcggcccgcgcaccacacctgttcgaccgtccagtcggccgggtccgcaaggttgaaatcggcggcgaagccgggggcgatgaggccgatcggcgccccggtgaccgggttcggccggtcgaagccgaacgccttggccggcgtcagagttgccgcctcgaccgcgtccaccgggctgaagcccagttcgcacaccgcacggcgcacggcgacctccagcagcagagtggagccggcgatggcgccgttggagaccaggcgcgcatgcccgccgaccacgttcacgtccagcgcgcccaacttgtaggcgccgtccgggcagtcggtggcggccatcgcgtcggtcacgaaggccgtgcggtgaggcgcgaaccggaaggagaggctcaccatcggatcctgcacgtggaatccgtcgttgatgagctcgatggtgacgcgcgggtcctccaccgcggccggaatcggaccgggttcgcggtgatgcaggccgttcatcgcgttgaacatgtgggtcatgatgcccgcgcccgcgtcgaagccggctttggcggtctcgtagtcggcgtcgcagtggcccacggccggcaccacgccggcagcggcgaactggcggatggcggagatgccgtggggcagttcgggggcgatggtgatctggcggatgcagccaagcttgccggaggcggggtcggcaccggaggcctcaagcatcttatcgacgatgtcaggcaccggatccttgagacattccgggtcatgtgcgcccttgcgggccagggccaggaacgggccttccagatggcagcctaggatgtcggggcggccggactccattgtggcgcggacggtgcggatgttgcggcagatcacgtccacggggttggtgatcagcgagagcacctggcgcgtggtgccatgcacggcgtggccggcccgcgccacgtcgatgccgtccggcccgtcatcgaagctcttctcccatgcgccgtgcgcgtggatgtccacgtagccgggggtcagaatacggccttcggcgtcgatgaccgcgttgcgatcggccgggtcgagccccaccgtgcggcagcagtgctcgaaggccccctcccccgtgccggccgccacgatgacgccggcggcatcggagacgacccaatatccgcgccgttcgccgcgcgcatccaccttgcgcgcgttacgaatcgccaccggagccggcttgccctccagtgccgcggtcacgcgcgagactatctcgttcctatcagacatgttgttctccttaccgctcatgcgctcccgctggcgggagccagcacacgataactcagatgccctgccaggccggcttgtgggtgtaggcgtaacggtagtagtccttgtggcgcaggcgggacgcggcctcctcatccacgataatcgtggcgtgcgggtgcatctgcagcgcggaagccgggcagaacgctgacacgccgccttccaccgtctcctcgatggcttcggccttgccggcaccgaacgccagcagcacgaggtgacgggccttcatgatcgtgccaataccctgcgtgatgcagtgggtgggcacttggttgatgtcgttgtcgaagaagcgcgcgttgtcgatgcgggtctgttcggccaaggtcttgacgcgagtgccggaggccagcgaggaaccgggctcgttgaagccgacgtggccgtcggtgccgatgccgaggatctgcacgtcgatgccgccagcggcttcgatggcacgatcataggccgggccggccagcgcgatcttgtcgccgtcttcaagcggagtgccgttaagtacgtcgccgggcacatggaccttggccgggtccaggccgagcggttcgaccacagtgcgatggatggtcgcatgataggactcgggatgggtcagcggcagtccgatgtattcatcaagcgcgaaaccacgcacgcccgaaacgtcaatggcctcgtccttgacgatcttggcgagcgcctgataggcggccagcgggctggagccagtggccaggcccagcacggcgtccggctttgctttgatcaggtccgccacgcaacggccgtagatctcgccggcctcggcttcgttcttgacaatgatgatttccggcatcggtttcctccagttccgtgcggcccgcccgatgcgagtcgctgtaccgccgcccgtcttgcggataatggcaacatccttgtcacgtccgggtgccgcgcggcgttccaaccaccgttcggcgtagcgccgattggtgattcgctatttgttaatgatactaacaattttggaccttatgaacactcacggtgtttcctgacgcttcacacaggtacactggaatttattagtgaagtttcataacagtttcaacgacgaaattgcgcttcaccgtctaagctgtgtatggaacaacaatcgccgtccactcgctcaccatcaggcaggaggaaacatgtcatatctcggtctcaacacaacgaccgacgaccatgcggccaaggcttcccccgccgatgtgcgccgcaagaaccgccaacttatcttcaggttgttgttccccaccaaccagtattcgcgcgccgagctcggccgacgcaccggattgagccgcgtggccgtttccgatgtggtcggtcggatgctggaggaaggattgctgcgcgagaccggtcaggcacccagcggcgacaaaggcaaacgaggcacactgctaagcatcgatatcgatcgactgcgcatcatcagcatcgacctgacgcaggagcacctgctgcacggcgcagtcaccaatctgctcggccagccgctgcgtcacgccgaagtcaccctgaacaccggctcattcgtttccgtggatgtgatcatcgagctcattgagaagatgctgggcatgtccgatggcgaggtcatcggcatcggagtcgcctcccccggcgtggtagacaacggcgtggtccgctcctccacgatgcgcggctggaacaatctcgacctgtccacgccaatcgccgaacatttcggacttgaagtaaacgtcagcaacgacgccaccgcagccatgctcaccgaacgtttctttggccaaggcgggccgaatatgcttttcgtgcgcatcgaaagaggcatcggttcggcgattctgctctcggacacgccggtaaccggcgaactgcacgcggctggcgagctcggccatatttccatcgatcttgacgggccgctgtgcccttgcggcaagcacggttgcttggagacgatgatttccggaaccgcattgaagaagcaactcagcgcagcagacgtggagcagcatcagggtatccttgctcgggcgggccgctatcttggccaagccctggccatgcctgtgggccttttggatatggcagacgtatgcgtctatggccagccgaacatcatcaacgcgacgttcatcggcgcggcccagcaatatctggatgccgccacatcctcgtccttccacaaacacacggtgattcggcgctgcgaatgcggacctgacatcaccgtacagggcgaggccatcgccgtggtcttccaacacttggccaaataaaagccggtcaccccggcaacgaaacgcgcaagaccaagcgcggcacagcacgacataaagcgatataggactgcgcgggagatggggcctcggagacaaatctgaggcctcatctcccatgccccggcactatgccaggctacgccgccatggcggcaccgatggctccgactggttggccgacaggtgccagacgcagccgggccggcaggtccagcgtttcgaggaatcggcattgcgattcgcgccggcgcagctcagccgtgatcacctcgaccaatggttcgccggttttggccatgccaccgcccaagatgatgagtcgcggatcaacggactgagccaggatttgtatggtgtcgccgatggcgcgcactaccatgtccagcacatcgacggccttggcctcccgctttttcgcgcgacgaatcaggtcgggcatcggcgggtcggcgttgggccacagacgccccacggatgcgcccgagcagactgtttccaagcatccgtattgcccgcaagggcacttgaggcgatgaggttcgactgggatatggccgatttcgccggccgcgccgctatagccatgcatcagcacgccgttttcgacgatgcccgcagccagtccggtgccgaagttcaggaacgcaatggtaccggccatgccgtccgcaccgcccaatacggtggccgcgccgacggcggcggcattgacgtcgttttccacatgggccggcacgcccgaacgctgcgagaccaacggccccatatccagcgagaccacgtcgagattcacgatattgcccacatgcccgctggccgaatccaccgtgcccggggtaccgataccgatggccctcacctcgtcaaaacgctcacccgctgcctgatgtgctacagcgacgatgtcttcgatcacggcatcgttgccatgcctggcgggaatacgggcggaacccaataccgtgcccattgcgtcaaccagcacagcttcgatttttgttccgcccacgtcaacaccgattttgagattgttcatagtgttttcagacatcagtcctcccctgttcttcatcgaacgtttcgcttgatatcagtgtgcatccgactattgacaaccatcttaacaaattaccccaagacgacactcacatgcacgacacaccgaatgacatattgattgcgtcaatcaattaacagcgttaatatcttaatcaagttcagattcaaagacgagcggaacaactcgcagcggtgcagacaaggaggacttaagaccgatggcaacaaacaccacccacgccacttcccaggccagtgtctccgaatccaaccgctcccgcatcgtcaagcacctgtatcacaacggcatcagttcccgcgcgcaaatcgccaaggcactggaactcacccccgcggccatcaccaaaatcaccgcacgccttatcgaggccggcatgattgaagagaccggcgatctggaaggctccaagaaccgccgttccatcggactcaagctcaacaccacgcacttccgcatcatcggcatcaaattcgcccgctcgctggtgcagatcggcgtgttcgacctgtgcggcaacaccctgagctttgaaaacctgcccacggtgtgcgacaacaccatcaacgactccatcgtcaccatccaccagcgcgtcgaacaactgctcgacaacgacccgtccatcgtggccatcggcatggcagtgcccggcccctatctgcgtaacgtgggccgcaccgccgtggtgtccagcatgcagggctggcgcagaatcaacttcatcgacgaattcgccaccgctttccgcgtgccagtgttcatcgaacaggacgcccgcgccggcgccctcgcacattatctcttcgacccgtcggtgcacgccgacgacaacctcgcctattatctggtcggcgaaggcgtgggcctcggcgtcatcgacaacggtcgcctcatcaacggcttcctcggtgccgccaccgaaatcggacacatctccattgacgtcaacggccgcccctgcgattgcggcaacgtcggctgccttgaacgctactgctccacccccgccattcacgatacgctcatcgccgatggcaccgtggttcccggcgcggccgatatgacccacaccgaagccgcccgcgccctgttcgccaaagccggcgacggcgacgaagcggcaatcgccattgtccgcgaagtcgcccgatacgtcggctacggatgcgtcaccatcttcaatggatacaatcccgagcacatcatcatcggcgacatcgtgtccgaagccggcccgatactgctcgatgaggtgcgcgccacggtggccgaacgggccatccccgaaatcaatgcctccacttccatcagcctatccaccttgtccgccgacgcggcggtctccggtgccgcagcagtggcagtgacccaattcctcgaacacccctcggtgttcttcgacgtctcctaaaccaagcgccgacatcacaagattttccatacgaaacacccgataaaggaaacaaaggaaaggaaaccaaccatgactaccccgatcgttctgagcctcggtgaactgctgtgggacatgctgccgagcggcaagcgagccggcggcgcccccgtcaacttcgcctaccacgcgatgaagaacggcaccgaaggctgggccatcagcgcggtcggcgaggatgaactcggcgacgaactgattgccaaggccaacgaggccggtatcaacaccgtcatccagcgcaatgcctggccgacctccaccgtcgaggtcgcactgaagaacggcatcccggagtacaccatcgtcaagggcgtggcttgggaccacatcctgtacacccgccagctcatcgacgtggtctccaaggccgacgccgtctgcttcggcaccctggccctgcgctcccccgaatcgcacgccaccatcacggagctgctcaagcacaccaagccgggcgcgatgaagttcttcgacatcaacctgcgcggcgaccactactccaaggaacttatcgaggaactcctcaaggcggccaccgtcttcaagatcaacgacgaggaactcctgctgctgcgcgacatgttcgacatccgcggcacctccggcgaagatgcctcccgctggttcatcgaggaattcggccttgactacgtgattctgaccgccggctccgcctactccaccatcatctcccgcaagggcgaggtctccacgctggacactccgcacgtcgaggtgaacgacaccgtgggtgcaggtgactccttctccggcaccttcaccgcccgcatcctgctgggcgacacgctcgccgaagcccaccgcaaggccgtcaacaccgccgccttcgtctgcacccaggccggtgcctggcccgagtacccggccgagatgcccgactatctggctgaaatcggcaagtaatccaaaaccacctattttcccgatggctttgccgtcctataccggcaaagccatcctgttttaaaaaggagttaccatgtccattcgtgacaccgtcaccggcgtccagcatgtcggcattccgaccacggatctcgaaggcaccatcgcctactacgagcgtctcggcttcgaatgcctcggcatctatcccaacggtgaggaccgctgcaccttcctgcgcctgaacaacctgaccctcgaggtgtggaccatggatcccaccccgatggaaaacggtgccatcaaccacttcgcgctggattccacggatatcgaggcgtccttcgctgaagcgcagaagctcggcctgaacttcgcggaaggctccatccagcacatcgacaccttctggagcaacggcatccgttacttcaacgtactgggcccgaaccacgaggtcatcgaattctgccaaatcatgtaacaccctgatggaacccggcaacaggactatcactattcactagtcatcatccattgatcgatcgatctgtcatacgtccatttatagagaaaaagggaatacatatcatggacaagaccgcatccaagaacgtggcgtgggtggaaagccctgacggctaccttgatcgcacgccagtattgcaattttcaatgacttcggtgctgttcgccttctaggccatcgccgcaagcctcaatgacattcttatcacccagttcaaggccgtattcgacctgagcgacatgaagaccgcgttcgtgcagtccgcattctatgccggctacttcatcgtggccatccccgcctcgctgttcatcaagaagaccagctacaaaatcggcatcatgaccggcctggcgttcttcgcgctcggctgcttcatcttcttcgtggaccgtatctccgccagctacccgctctcgaaggtccgcgagactcgcgtgctgaccgtctacatgattatcggctgcgtgattcttctcggcaccgccttcatcctgccccgccatcgagctgttggtcgtcggcctgtacttcctgactgaattcaagcgcgacacgtacaccccgccccagctcaaggccatggacgagaagaacgaggcctgattccgccccctttgttcgtcattcgtgtgacttcacgaatcgactgaccgcaaccggtgagattctccgaacaggaaatctcaccggttttttcatatggtgtactcacggccacgctcttcacatcctttcgcgtgtcttcaactaaagcggtttagaataatgctgttcccttgatatgtatatccctcaaacaaagaagttgaatttatgacgaccaccgcgataccgaagtcggtctcggatttcttgcagcgcatcacggacctatgtggcaccgaacacgctgattgggccgagaacttcaacgcctgctttgccgataccctgaccaccacggtcaaacggcatgacgacggcaccacatttctgctcaccggcgatatcccggccatgtggctgcgtgattcgaccgcgcaattacgcccttacctagcccttgccgccaaagacgacgacattgcgaacttgatcgccggtctggttcgccagcagttccgctacattaccatcgacccgtatgcgaacgccttcaacgaggaaccgaacggtgcctcctgggacaaggacgatcagtccgacttctccagcccttggctttgggagcgcaagtacgaggtggattcgctgtgctaccccatccagttggcttggatgctgtatgcgaacaccggcaacaccggtcatttcgatgccgaattcattgccggcgtcaagaagattcttgacgtattcgagaccgagcagcatcatgaacgctccccgtatttcttcatccgcgacacggacatccccaccgaatcgctgagcaataacggcaaggggtcgccggtggcgtacaccggcatgacctggtccggcttccgccccagcgacgacgcctgcacctaccactatctggtgccctcgaacatgttcgccgccgtggtgatgggctatctggaacgcatcttcggcggtgagattctgaatgatgccgatatcgccgcccgtgccggcgagttgcgccgcaccatcaccgaaggcattgaagcccacgccaaaacgacgaaccgcaatggagagacgatctacgcattcgagaccgacggcctgggccacgtcaatatcatggacgacagcaatgtgccctccttgatggcggccccttacttgggatactgcgcaccggacgatccgacatatctggcaacccgacgtacgctgctcagcgacgaaaacccgtactactacgagggcgagtatctcaagggcatcggctcaccgcacaccccgccgcgctatgtgtggcccatcgccctgtctatcgaggcgatgaccagtgacaacaaggacttcaaggcgcatatcctcgaccgtcttgtagccaccgacgccggtacacatctcatgcacgaaggcatcgacgtgaacgatccgaccaagtacacgcgcgaatggttcagctggtcgaatatgatgttctgcgaactggtcatggactatttcgacattcgcgtgaaacactaagacgtgcccgctgaatgctcattgtgcacccaccgcatgttctcgttaaggaaaggaacaatcattatgaccaataacccacgttatacgctcggcaccgaagccaaccgcattttcatggcttccgaaacctacgagctgctgaagttcggcaaaggcttcccagcaccgaacggcggttccggctggctgaacgccgacggcaccctcgacccctcccacggcgtcgaaacgtggatcaccagccgtatggcccatgtgtattcgattggtgccatgctcggatacctgggtgcgggcgagctggccgacgcggcgctcaagggattgaccggcattctgcatgacgacgagcacggcggctggtatccgcaggtgttcgcggacggcacccatgcgccgggcaaggtctgctatgcgcatgccttcgtgattctcgccgcgtcctccgccctgctggccgggcgtccgggtgccaaggaactgcttgacgaggcacttgccacgtatgacaagcatttctggaatgacgaaatcggtttggccgtcgatacctggaacaccgaattcaccgagctcgacccgtatcgcggtctcaacgccaacatgcacaccaccgaggcattcctagccgtggcggatgccacaggagacaacgcctatcgagtacgcgccggacgcatcatcgatcatgtgatcggctgggcgaagcacaacgagtggcgcatccccgaacatttcaagtccgattggtcgctggacctcgaatgcaacgtcgacaagaaggatgatcagttcaagccgtacggcgccacgccgggtcacggcatcgaatgggcccgcctgatcacgcagtgggcgttgagctcctttgccaaccttgacggagcacagccgtacgtcgacgccgccgaacacctgttcgcgcgtgccgtggccgacgcatggaacgccgacggcaccgtgggactcgcctacacgaccgactggaacggcaagcccgtggtcaccgatcgcatgcattggacgctggccgaatcgttgaacacttccgccacgctgtacgcggccaccggcgaggagatgtacgccaactggtatgccacgttcgcccagtatgtcgacgaacatgtcatcgaccacgagagcggctcctggttccaccagctcgacaagaacaaccacgtgatcggcacggtctggccgggcaagtccgacctgtaccacgccttccagtccacgctgattccgttcctcgacccggccgtgtccatcgccaccgcggtcaagaacgcggcctgaccggcaatatcttagccttcttatctcctccttcaacgacgttggccccccgcttgataacgagggccaacgtcgtatggattggaagtgctgactcagaatcggtggtttctatattccacaggagttacagggtttggccgtgctgtccctgaccaccagtttcggggtgaggattcgacggttgccgctcacctgttcgccggcgagcactttgagcagcagtttcgccactttggcaccgtattcactggcgtcacgatgcgctgaggtaatcgacgggtacgctgcctcacaaataaagctgtcttcaaagctgacaatagcgggcaacccgttcggataacccgcagattgcccctcccctgttttcagttgcccggtggtatatgcttcggccatggcatgcagactggccgcggcaagaatttccgtctcgtagatgaatgcagtaggaggcttcggcgaacgcaacatctccagcgtaagcatcgcggcctgctcggcatcgaaattcgtgaactcgatgttgatggattccagtttgcgccgttttgcgaacgaccgaaacgccgacacacgcccctgcgaataatcgagattggaatcgccggacagataggcgatacggcggtgccccagtgacgacagatgttcaagcacggtgcccatggtgcgcgaatcatcgatggacagcgacggtacataattgttcggatcagggccaccggccagaaccgcacgcacacccagttccttcagcagtttcgggcgtggatcgtcggctcgcagatcaaccagaatcaccccgtccacacgcttgcgtgacgcccagtccctgtagacgctcatctcctcgttcagcgaacggcaagggcgatacagcaagccgtatcccttagggctgagcgaggtatgcacaccggccatgaagtgcaacatgaaggtttcgtccgtgagtccctgtgcggagcgtgcgggggcaaagcctatggtcatggttttcgacgagcccaacgcttgcgcggcatagaccggcgtccacccaagtttggccgcagcctccttgactcgtcgtttggtttccgcggaaacaccaggccgatcgttgatggcaaaggacaccgcggtttgcgaaatgcccaactcatccgcgatgtcttttaagctcacacgctgcgtgcctgtggacgatggtgatgcctcgcgagcaaatcccatgaataatcctccttgcagccacgctgcgaataccacgctacaacagattatttcccactttgggccgcatgtaatcagctgtgttctaatacctatgatatcaacaactaaaacgttttagtctatgggtctcagcatatgttcggatataaaaagcgggatatagggggtgtctacagggacaaccaccccatatcccgcttaaggcacgggtatcaacgcacccgcatacgcagcgaaactattccatcttgctacgagcacgaagcaccaccgtgcccgctccgagcaacaccactgcggcagtcacaatcgcaataatcgaagagcccgtcttactcagcgaagagtccgatgcgccattcttatcattgttcttgttgttgttctggccaggcttgttgtcgccgggcttattcggcttgtccggctggccgggcttgttcggggtcgccgcgaccttggtgaattcgatggcgacaccctcaccgatggacttgtcgcccagtgcggccttcaccgtgtacttgcccaccttcgtggacacgacgttcagtgaagccacgccagcggcatcagtcttgacagtggcgttgccgtcaacggccgtgacaccctcgggcagcgtaaacgccacctcggcgttggtcagcggattgccgaacgaatccttgaccgttgcctgaatcgtacgtgtagccttgccgtcggccacggccgagccgtcaacggcggtcagcgtggactccttggcatccggctgagtcgggtcagagaccgtgcacttggccagttcgtcggcggtctgaatcttcaccggatcggtcttgttgccgctgtaatcctcgacctgcacccgcagttcatgactggcgggggatggacctggtgtatgaggcaggtgtggtacaaccacggataataccagtgattggcggagtgttctgcgagtaggtgtagctagcacccagctggttctcctgctgctgcttgccattctcgccgatccacttctcggtcatgtacaggtagcgccagtcttgagtctcaggacgggccagcgtcacattatcgccattccagatcaccgagcaagccggatacggctcaatggcggcatcggcaaatgcacctgttgccgtagcggtagtgccacctgcattatcgacgttcaccacatagcgggagctgtcaaccggcgcattggcaatcgtcactttgctcttgtcggcggcgaccttgacggtctgggaatacggcttcgcggcgtaacgccacgaaccggtgtcggatttgacggtcacggttttctcgccggatacctgcggattggtccaagagaccttgacgttgccgtccttgcctggttcgactttcacgtcggagacggccgccgcttcgttcagcggcgcttcggtggcgagcgaacgcgagccgtccgcgcccacggcgtagagcttgagcgtgccggtcttggcgggcaggtgcttgacatacagggtgtcgtcgtagcggccgccgaggaaggtattgtccaggtagagcaagtagttcttgatggtggagtagtcggcgagattccacttgacgatcagacccagcgtggcgatcttcttacccgcgtactgggacaggtccacgctcgcggtcttccagccgttgcctgccgaaccgtccgtcacgtccaccggcaccacggtctcggggtcgtcggcaaggatgaggccaagctgcaacttggaatcatcgctgttgagcttgttgtaggtcaggtcaaccttggagccggcagcgacatccaggtcggtcttgtacaggcgaatggtgttgtcgttggagagcttgccgctcagcaccagcgaatcgccgccttcgtaaccaccgaccttggtgtacttgaagcgtggtaccgcctcgtagtccttaccgtagtcgaagtcggcctgcagcgggtcggagtcggcatcgatccaccactgccatgtcggcagaatatcctgcaggttgatgttgccccactgctggtcgctggtccgttcgccgccatcacgccattcgagaccgtgaccggtgttgaacgacgtagagaacatggaaccgccaaccacggagcattcggcgatctgggaagcgaagcccttccaaccgtcattgctcgtgccgtcgtcgatgtaattgtcggcgatgtcggtggtgcccttctcgccggtggacgagccggtccacagtcggcgttcgcggtcgaacacctggttctggtatttcggatagaccttcttgtcgtcgcccagttcgcgggagacgaagtcggtgccgagcgcggcgaggctcacatacggcttacctgtatcgtcgagattgacgttcatatagcccgcattgctgccgatactgtcgaacttcttctgtccggactcgatgccagcaaacaccgcatatttcggatcgatgccgaaactctcggcgtgagcggccgaatccttaagcatgttgccgctgaaccagtagttcaggaagatggaatcagagatcttgcccttgtccgtatcctgcccatacggcgaattgctgccgttgaacatgtcttggtagcctacgccgccacccgggtatgtggctgagtcgtaccactggatgtaaatgccctgatcgacgatctgcttcatgaagtcctggtaggctggaacatcgtcggcgacatcgccaacttcaaaagcgcggcccacctggccgcctacgccggcatcgctccggccaccggccagtccggcaccagcatcaagggcgagagaccctccagacggggcaacaaacgcctcaggaacgcgctgtgacagtccttgttcgtcgcgtccgccaaacacccgccgtccatcgcctactacaagcgcaaacgcgaacagggcaagcaccacaacgccgctgtcatctgcctcgcgcgccgacgctgcgacgtaatctacagcatgctcaaaaacggcgtcctctaccaggaaccagccctcgtagcctgaatcgggccacacgggaaaggacgccggacgccaccggcagggcgaagcgcgcccacgacagccaaccggaatcccgacacgtcaactccccaaggagttgacaaaaacataggaacacccccatggcattgtgccggtggcgctggccggtgcggccaacgccgccagcgtggtcatcgacaataccgcggccagaccgctgcacagccatttcctgtgttgagcccgggcagaagtacacccagcgggatcgcctagtgacaatctcatctataatctcctttgacttcttccggcttacgccggagatcaaccgtctgcgtactacttcgtccctaccgatgtgggccatgggatacggcgcttcgcatatcgcgccgtatcccaaatactgtttttcggttcattcgaaccggtgttatccgcggcggcggactgcgaatacgctgataccggcgagcgtcataatcacggcgaccgatagcacgacggtgccatcggaaccggtgcttgccagacgtccggttgcagactgtggcttgttgtgtgatgcgtcaccggaactaggtttgtccgtttcgcctgtgccctggctgttgcggcttgggcttgccgcccgttgcatctgcgattgcggcgttgagcgatgccgtccaggagacaacgtcagctccggtatacagcttgctggtcaggccagtgaccgccgcgtttctggccgtggtcagcgttgtccgcacatcggtatcggttgcgccgtcagctagcaatgcatccgccttggctatggcaccggtaagtgccgtggtgtcgatggaggtcagggaaagttcgagcgtcggatcatatgtgttgctgtatccgtcgttccaatccgcgccgagcaccgccttgttcacctcatacaggttggtggccgctgccacggtttggcgcgtttcggctggaacatccttggtataggacatacggtcaaggaaatggttggcagcctgcttggcgttttccagactcatgccttggctttgtgcgatggctgtcttcgtccaaatcagattcgacggtttgatgtgtgccaaatcatcgtcggaataggtgcgtccgtcgcggtcgagcgcgtagacgaacatgcctccgagattgtggtcgtacgagtatgaggccacatcatagaaatgactgtccaggtatggttcggtcgcgtcgttccaccggttattcatgtcaccctcttcggggaaggtcagaccgggaacgaacttggtcgagtcgataaactgttcgtaggtggcagcggccttggccgtccggttcgaatcggaaccgtactgctggtaggcaacatagtcgaagcaatcagaaacgttcttaaacggagcagtgtagctgccattggtgtcgtaaaggaacatcgtgccttccgggttatccgacttcggcccgatgcgcttggcgagggctgtgatgacctgatcggaaatcgccacctgcgcggcatccgggaaagtttccatatcgatgtcaagaccgtcgaggccaaccgaggtcatgtacgtttcgatgacatgatcggcgtacgcgtcataatccgattcggtcgcgctatcgacgtttttgccctgctgagcaatccacgtcttgaaaccgtcgaccataacaccgctgtaatccaaacctcgtacgagtttgatgcctcgggcatgcagatacggcgcgtaatcgctcttgagcttgtcatagaacggctgggccgccgcttcctggccactgggaacgtagctgaacacattgacgacatcgatgccgtatggaatgtcgtacatggagatccaattgtcatccggtaaatcggtgttcacgcctttcatggtcacgtcacgccatgcgcggtaatacaccatgaaatgcttgttgccgttaccctcctgcgacgccgcaacgggggaatccccctcctgggcgttcgcaaccgttcccatggccagcgaacatccgagcatcagtgccgtggcgactacgcccgccgcgacggcggcgagtctgcgcccgatggacgagcgcccttcactaccttgtgagcaacacatatataatctcctttgttgtttcctctatcgggtgacaacccgcagacttgcaggttgcgaggatggatgccttgcggtttcaggctccatccgggggtgtgatgcggttccagtgcttcgcacccccacattcatacaggccccctaatattcccccggcagcgtcgccgtgaccgtatgcgtcgaatctccatccagcgtgcaggtcacctgaacttgcccgtcaccgacatcccgcagacgatcacacggcacgtggaacgcgatatcgcgacgctctcccgcgttcaagtccatgtataccgaatcgacaagcattgccaaacgtgggatgcggcggccgccgctgacatgcgcgaacagattcacggcacccgcggccccgtgatcgtcagcatgtgccgtcacctgcaccagcacttcacctggatgcgattgcgtatcggcgtgcatctcgctgaacgtcaccgccgccagcgaaccggctccatagccgaagccgcgcaatatcggttccgccgcatccttgtagacatgcgcggcactttggcggtcattgtatcgaacgggaatggctgcgggatatgcgggtaaggtcacaggaaggcggccagacatgtcggctccgtcaaccaatacgtcggctacggcctgcggcccatattggccggcatatccggcccagatcgtcacggcggagcgttccagcacatcggtcagtacatgcgcgcgaccgcacaccgccaccgaaacaattggagcggtggtcaatgccgcgacttcgcctagcatgtcatcctgacgccagggcaggcggatgtcagacaagtccacgccttcgccgcaggtggcaccgtattcggttacggcctttgccgcaccattgtcgtcgaattcactgtcatagctgcgttcgctggtgctgccgcatacgaataccacggctgccgcactcgcccaccgatcggccgacacatcgctcggcttggccgccaagcaaacccggtctttcccaaggcgtgccaccaattgccggtagatgcttgactgctcatcggcgggcagaggggcggtgtaatcgcccaggaagcagccgaaatcgtcggcgaatgggccggcgacaatcacagggccggcttgggcatcggtcagcacaccccgaatgctgtcgagcgtaacggcagagcggccatcattaatcagcgttatcgcctcgcgggccatgcgcttggcctgctcacgcccatccgcagtggcctgcgcgatggcatcggcatctggcatggcaattgcggcggtatcggcaccatcttcgggcaagagaccgaacatggctttgagctccagcacacgacgcaatgccgtatcgacggcggccgccacctgttcgtcatccacatattcttcgaggcgcgcgaatccttcatcccacagggagacatccacaccggcaagcagtgcggcgcgtccggcagcgggaatggagccggccatatcttcaagccggtccacggccagaccatcggccatcacgatgccatcaaaaccgagctggtcacgcagataatcctcgagcaaccacgggttggcacaacaaggcacggaatcgatatcgttgtaggcagccataaagcccaaggcaccggcacgcacgccagcggccaccggcggcagatgaatctcgtgaagatcgtgcgggcccaatacggcggactgcccgttgcggccacccacagcctcgccttgcgccgccaaatgcttgagcaccacggccactcccccgcggccgaccttgctgcgatgctcaccctgcataccggtaacgatggcctcgcacatgcgggaggccatcagcgggtcctcgccgaagcattcctcgcaacggccccaacgcgggtcgcgggcgatgtccaaaccggataccaatgcaatatgaataccgctggctgcaagttccgcggcgactgcggcttccgcttcctgcactccttgcgaatcgaatgtggcacccaatcccagattggtgggcagcaccgcgccgcccagcgcctgatgcccgtgaggagcctcttcgctgagcaatacgccgatgccatgtgcaccgcgctccaacacggtttgctgcaccacggcaaccgcctcaggccgttcctcagggcgtatgccattgccccaatgctggcccgaccacgggtcagctcgcagcaggccgtacaaagcgccaagcccgccccaccggtcgatctcttgcttgagctcgtctgaggccacaagccgtcctgcggcattgcgttctacggacttccaaccgaacagacgctggttcagctgaccaaccttctgcgtgaagctcatcgaatcaatgagtcggtccactgcggcgtgattgatgctcatcgggtgcgccccctctcgtatataacttctcgttcttcccgctcttcggcgagtacagggtcttatgttgtgcactgcgcaccgcaattgtgcgcacggcaattgaaaatatccggttgcggaacaaggagtagatgattccacaaccggatatcggtttagtcagccgtttcgaacgatgggtccgaaaccgcagtgtagtagcgggcggcgtaggggtgctcgtcggcgtgcaattcaaggatgccgcgacgcgcgagttccgcctgatcggccgccacctgcgaggtgatgatggtcgggcgctggcctgccacctgcagcttcatccacaggtcgcacaccgaacctcccgggccgagcgcactgcggttcaccgggtttccggcctcgtccacatcaaccaccacggcgacggtcttcggctgagccggcaatgcggaacggtactgtgcggcgagctccccgaacgtacggccaatcggcttcagctggccttgctcgtcgaacaagcccagagagtgctcaaagaacgggaagtcttccatgctggcgggcacatcgtgcgagcaccaccacgtcacaccccacaggttccggcaatccatggcacgttcaacggtcttgcggcagaattccggcgtgtagtcggtttccagcacattctccggcgcaccgacttcctgaagccacaccggacgctcggaatccttgccgaacgccttggccagctcagccaagtacagtgcgtacgacgaacattcctcactggtagcgccgtatccttgcgcgataccgttaaacacccaggagtgaatcacggtcatatcgcccttggtggcagactgcaccggcgtgaacgggtgcccgtcaatgaaccaagtgccatcgttgacgctgtacagtgcgttatgcccttcgccggcaacggccggaagcagtgcattcagccatgcatcgatctgctggctcgtggcgctcatcttcgtaggatgcggcctgtcagacagctgattgacctcgttgcccaaggtaaggcccttgaacgcgggttccttggacagctcatcggtcatggtcttgaccagttcacgctcggccgcaacggagtccgcatcggtgaacatgttgcccgcatgccaggtgaccagccatgaaggcaggaagtcgaagctggacagatgcccttggaacacgtccacataggcatccaaaccgtgctcgccggcgatgtgcaccatgcggcgcacatccgccacgcccttcttgttgatccaagtgcgattaggttgcagatacggccagatcgggaagatgcgcacatggtccatacccagttcgctgatctgcttgagatcgttgtcgatgccgtcccagtccgggtcgagccatgcgtggaaccagccatgcgacggcgtgtagttgactccgaatttcattggagtatctccttttttccagtccgctcagcccttgagtccgccctgttccaagccacggaagaagtagcgctggaagcagcagaagaagacgatgatcgggataagcgagacgagcgcgccggcggcaatcagtcgcggatcttggatgaacatgcccttgagtcggttcatgccgagggtcaaggtgtacttgctttcatcggagatcgcgatcaacggccacaggaagtcgttccaggcaccgacgaatgcgaagatgccgacaacggtcatcgtgcctttgacctgcggtacacagatgtggaagaaccgctgccataggttggcaccgtccaccatggccgcctcttcgagttccattggaatggatctgaaggcgttggtcatgagcaggatgttgatggcaccgcacaggccaggcagtgcgactgccagcagcgtgttctgcaggtggatggagcgaatgatcaggaactgggagatcatcacgccttcgatcgggatgaccatggtgcccatgaacatggtgaacaccagtccgcggccacgccacttcaggcgtcccagtgcgtagccggccatcgtggagaaaaccacgttgccgaagatggagatcaggcagaccaccagcgtgttgagcatgtagtggaataccgggacctgcttgaacacggaaatgtaattctccagcgtcggggtcttcggcatcaggtagggaggcacggcgtagacgttgtcgcccttgcccttgaacgacagggacagttcccagacgaacgggccgacgagcagcaggaacatcagaatcagaatcagatactggacgactttgccgacagtgaccttatgcgtgttggtattcatcagtcctcacctcgcttttgtacgatctgctgcacgatgagcatgacgccgacgatgacgagcacgacgatggagatggcgctcgcgtaaccagtgcgggcctggataccggtgccttcgcgcttgataagcatcgacatcgtcatatccatgccgccggggcctgcggagccgttggtcaacacgtagatctcgttgaagactcggaatgcggcgatggtggacagcatcatgatgagcatcatcgtggagcgcacgccgggcattgtcacgtagatgaactggcggacagggccagcgccgtcgagggaggcggcttcgtaaagggattcatcgatgttggcgagggcggtcaggtagatgaccatgtagtagccgaggcccagccagattgtcacgaacatcgagctgaagagcacgccccatcgatcggtgaggaatggaatcggcttggagatgatcttcaatgccttgagcacggagttgaccagaccggcggaatccagcaggttggtccagatcatgcccaccacaacggcggacataaccaccggcatgtagaaggcggtgcggaagaagcccatgattcgggagttgcccttgaccagataggccagaatcaacgggaggatcaccatgaacggcactacgcagatcacgtagatcgtggagttgagcagtgcggtgaggaagtactcgtcgtggaacagtttgatgaagttttcgaatccgacgaatttgcccggacggagcagcgtggaatcggtgaaggcaagcctgaaagtgttgagtgccgcgaggacgatgaaaacaaacacaatcacgaatgcgggcagaacaaacaagtaaggggcaatgatggtgccgaacttgcgatcctgcttcttgccgtgacgcgtattcatcggttcaggccggtcggaggccgtgcgggcctccgacctgtcagcggcgagtgccgcgttgctcactgtgcgagcttctcgtttgcgaactcgacggacttgtcaagggcttccttggcggtctgcttgccctgcatggcgagggcgatctgctgctggaagttcttgtagccgttgttgtcggtaaactcggccggacgagaaccgtagccgtccttgacctggtcgagcgtgatcttcagagccttgccctcaagggtgctctcgtcaatgctcttgtagtagtcgtcatccagaccacccttagcggacgggaacacggaggccttcttgtcgaactcgatctggttcttctcgttggtcacaaagcgggcgaagtcgatggcgacgtcggggtgcttcgagttggcgctgatgccgagcatctcgtaggccacggaagcggacttgccgtcgttgctgatacgcgggccgactgcgaggttcttgtagaggtccggagcgttctgcttaaagccgtcagcggagtaggcggagccggccatggagaccaagttgccgcgctggaagagatcggcggcctggctccaagaggagtcgagggcctccggcgggatgccgcccttcttgtacagctcaacgaagcggctgatctgcttgacaccggcctcatcattgaaggtgtacttgctgtggtcatcattcatgaaggacttgacgcctgcggtcatcagatcttcggcgttgtaacccatcgtggtgcccaggtagacatccttgcagttctgcacgatggtgtcgccggcggcgaagtattcatcccatgtggtcggaatcttgttcggatcaaggccgcacttctgcatgagctcggtgttccagtaggtcgggccatcgttgacataccatggcaggccgtaggcacccttctcgacgccattgccctgcatggtcacggacttccatgcgccttcgtagtagtccttttccgcatccggagcctgcttggagacatcgagcagcgcgccagccttggccagaccgtacaggatggagttgccgccgtcgacgatgtccggcagttcgccggccgcagcctggctggacagcttgtcttcgtaaccatcggacggggcgtcaagccacttgacggtgacatccgggtggtccttctcataggccttgatcagcgcctcgaaatacggggtgtacttgtcgttcttgaggttccaggtctggaaggagatctccttcttgccgccgtcatcccccgcagttccgctaccacaggcagccaccgatacgagcatcgcaccggcaccggcgatggcgaggatcttcttcatagaaaacatacgttttcctttccttttggttcctttttcgccccgccctgctgtggacggagaaaacctaatcgttgtgttccggtacagtcacccgtcgcggtgattgacgtggtatcacaacctttattcagttctcatcgctgagactaaaccgttttagtttccagccagttatgaacctgttaactaaatcggtttagtaagaatataacacaatcgaaacatgcacgcaacgaattcatccgcgcgtgtcgcattgatatttgcccaacgaaatcgtcccctcttctcatacaacaatgggccgcgcccaaccgtatggcagagccggtctactccggttccgttacggttgggcgcgacccaaaatatcgagcctaggcccaatatcccttatcggcgaatacgcagcgtggtgagctggaacggcgccaacgagacgaccgcaccgtcggcaggcatcggctcgtcgccggcgagcgcgcgcggcaattcggcgtccagttccggctcctccatgagattcacctcctgcacgctggccttagcatcggcgagagcggcgtcaaggcgtagtgcggccgcggcattgccgccggcggcctcgtacaggcgcacaatcagatcgtcggaaccgtcatcggcgagcttgacccagtccaatacgatggtgccggtgacgtcggtgagcgagaccagcggggccaagtcaggcaactcccctattacagggctgttgagtcgcgccgcctcgtccagcactgcgttcatatcggcgtcagcgaccagagaccatgcgaaggagtgcgcgccttggtcggtgcgtgggtcagggtacagcggtgcggacagcagcgacaaccgcaccatggtgccgcggccggtgccatgtgccgtatcggcgtggatggggctgacgtcggagccgtaggtggaggcgttgaccacagcggcggcatagtcggcgtcggcgatacgcacgaagcgatgcgtgcagctttcgaatttggcatcatcgctgcgcgtgttcttattgatcgggcgttcgaccaggccgtattggcattcatattgcgcgttcaccgcttgcacggtgaccggcatatccactttgaggaactgttcgacggcatgccagtccacatcggcggtgaagtccagtgtggcggagcccggccttaaggcaatgcccgtacgaatttcaacgcccttcgcgcgagtgacagcatgcacgacggccccaccgttggcggtttcatccacgcttgtaatcgatgcctcgctgagcgcgttggcggtgaggaatgcatcgcgttgaatatcccaggcgtcccagtggaagggttcgtctttgagcatttcgtagcggcccagtcgggtgccggctggcaccagttcacgattggttcgctgatcgacgattgacgaaacggtgccgtcggcttcaatgcgcacgtgcagttggccgttgtcgagcacaatcgcatcgccgtcatgggtaacggcgacccgagccatggatgcggttcccgcttcggctcggctcgaagccgggcgtaccacccacgcctcacaggcttggcgggaatatggggcgattacggcgtcggttatggttgcgtcatcgggttccacggctgcgatcgcgcgcccggcttcaagggcgatctcgttcagccgagcgacgtcacgcgcgtattcgacccgcgcctgacggtgtacccatgcgatggccgaaccgggcagaatgtcgtggaactggttcaggagcagcgttttccaaatacggtccagctcttcgcgcggatagacatagtccgggttcttgatgcgggccgcggcgcacaggtattcagcgacgcgcagcatcgactcctcctggcggcagccacgcttcatgtcctgctgggcggtgagggtggcacggtgcagttcaaggtacagttcgcccttgaacaccggggtctctccttgcgcatcgtcgacgatatccttacgcacgcggtcgaacagttggtcgggagtaccgaattcgatcttcggcacgccggcgagatcatggtcgcggcggatgcgcgcggtcatctcacgggtgggaccgccaccgccatcgccgaagccgtacagcagaatcgcgttacgggagaggtccttgtccaggaagttgcgctgcgaatacatcagctcatgcatgctcatccacgagcagtaggtatccgagggcgggaagtgcgtgagaatacgcgtgccatcgatgccctcccacatgaacgagtggtgcgggaacttggtggtgtcgttccacgagatcttctgcgtgaggaaccagtcgaatcctgcacgacgggcgatctgcggccaagagccggtgtagccgaaactgtccggtagccagatgccacgcggcgtgacgccgagatgctccttgaaatatcggcggccgaacgtgatctgccgcaccaatgattcgccggaaggaatcatgttgtcagattccacccacatgccgccgaccgggatgaaccggccttcttcgatgcgccgcttcattcgtgcgaacaggtcgggatgttcctcttccagccatgcgtactgttgggcggaactcatcgcatacgtgaagtccgggtcttcgtccattaaagccagcacgttggatacggtacgggccactttgcggcgggtctcgcgcaccggccatagccatgcggagtcgatatgcgcatggccgatggcaatgtggttgattgcgctggatgcagccggttcggcgagcacgccggcgagcgccgcacgggctgccggcacggtttccaagtcgcgttcatcgtagatgttcaaggagcgttgcagcgctttggcgagctgccagtagcgcgggtcgtcgtctttgagttcgcaaatcagggaggatacggtttccaagtccatgtcataggcgaacacgtcttcgttgaagatggtgatatccatgcgactcagtgtgtatgggaagtcacaggtgccggtggcctcttcgccgagttcggtgggtgagaacggggtggggccttcgacgaatgggttggcggcggcttcgatatagacggtgaagtcgccatgctcatcgagttcgacagtgctgccaccgtccgcgtagacgagtggaatccagtggttgcgtgggttcgcggatttgatggcggtgccatcggcacgatagacaagtccctcggattggaatccggggccgcggtgatcgagccagccgaggtctaccatgagttcgacttttcgtcctttgaccgccgccatgtcgatgtggccgttcacctcgaaccatgtggtgccccatgtggtgccccagacgccgggaacgcggaaaggttcgaagggcacttggccgttgcgcactttggctagaaattcgctggagggcaccggttcgccgggattgtggaacgaacgcaaggtgcatgcggcgagtgtggtgtggatatgcggtttgacgcgctgctgcatgacgcggtcgcagcgctccaactgctgattgggcagaagaaacatggagaattctcctttgctgtgtctgatgggaatgatggaaatgatgggtgtggtggcaattgggaaaaccgtaatacgacatgcttctgcctcctcatggttcgaggaggcagaagcgtcagacgggaattcagcgcgtgatgcgcagggtggcgagctggaacgggccaaagtgcaacgtggcaccttcggcgtcctgcctaccgtcttgcagcgcgactggaagatcggcggccagatcgtcgccttccagcacattggtctcatgcaccgaagcgcctgcgagcgccgggcagacgtgcagcatggcatcagcctggccaccggccgcctcataggcacgtacgatcaggtcgccggaaccatcatcggccagcttcatccagtccagcaccacggtaccattgacggactcaatcgaggcgagcggcgtgatatcgggcacatcatggagtaccggtgcgttgagcacaccggcggcgtcaagcacacggtccaccgtggcgtcggtcaccacggaccagtcgaactcgtgcgagccgatatcggtgcgcgggtcggggaaggtcggcgcggagagcaatgacagtcggaacatggtgcccgagtcacgaccttcggcggcgttcccggagatcggcgtggcatcggacccgtataccgatccgttgatgacggccgccgcgtaaccggcatcaccgataatggcgaaacggttcgtgctgctctcatacttggcttcgtcggatgcggtgtttttgacaattgggcggcggatcagaccatactggcagtcgtaggtcgcctgatcggccacgatacccagaggcagatcgactttgaggaagcgttcacgttcgtgccagtcaatgtcggcgtggaagtcgagcgtgtgcgagccggggcgtagcgtgatggtggtggtgatgacggtgtcatcgtcggcggtatgcacgcggactcgtgccgcaccgttttcggtatcgaccgattcgattgatccggtcatggcattcgccatgagcagggattcgcgttcgatctcccacgcatcccaaacggcgggttcgtccttcaacagttcgtattggcccaatcgggtgccggccggaaccagttcacggccatgctcctcgtcaagcagtgacgagattgtaccgtcggcctcgatggtgacggacagtacgccgttggccagcagtacacggccgttgtccaatgtctgggtcagtacggaaagcgcgttggtcggttcgttgatgcggctggcacaccaagccgcgccgtcattacggaactggctgatgcgggcttcggcgagcaggtcggcctgcgggttggccttgcgcagcacggcgcacatgtcttgggcgatttcggcgagacgcttcagatcgcggcgatagtcctcgcgggcttcgcggtgcacccatgcgatggacgaccccggcagcacgtcatggaactggttgagcatcagggtcttccagatacggtccagctcttcgcgcggataggcgtagttcgggtcggccaacgtggcggccgcgcccaggtattcgaccgtgcgcagcagcgattcctcttggcggcagccgcgtttcatgccctgttgcgaggtcaaagtgccacggtgcagttcgaggtacagctcgcccttccagacgggcatttccgggccggcgttctctgcaagctgccgatgcgccttgtcgaagaagtcgttcggctcttcgacgctcaccttggagacgccttcgaggttctcgtagcggtgcaggtgctccatcatgttgcgcgtggggccgccaccgccatcaccgaaaccgaagagcagaagcgagcgatcggcgagatccttgtcctggaagttcttctcggcgtagtcgagttcctgaaccttgcaccaagcagcataggtatccgccggcgggaagtgggtgaagatgcgcgagccgtcgatgccttcccacatgaacgagtggtgcgggaacttggtggtgtcgttccacgagatcttctgcgtgaggaaccattcgtacccggcacggcgggcgatctgcggccatgcgccggtgtagccgaagctgtccggcagccatacgcccttgggctccacaccgagatgttccttgaagtatttgcggccatatgcaatctggcgaatcagtgattcaccggcgggcagcatgccatcggcttccacccacatgccaccgaccgggatgaaccggccttcttcaatgcgccgcttcatgcgcttgaagatgtccggatgatcctcttccagccaggcgtactgctgggcggagctcatcgcgtatttgaagtcggggtcggcgtccatcagcgccaatgcgttggatacggtgcgggccaccttgcggcgggtctcgcgcaccggccacagccatgcggagtcgatatgtgcatggccgatggcgctgacgttcatggccgaggcgttggccggcttggccagtacgccggcgagtgctgcacgcgcggcttccacggattcggggttgcgctcgtcgtaggcgttcagcgagcgctgcagcgctttggcgagttgccagtaacgcggcgactgtttgtcggcgaattccatcagggagctcaccacgtcgagatccacggagtagttctcgaaacgggcatcgaattcggtcagatcggcggacttgaatacgtacggctcgtccggcttgccggtggcatggtcgcccagttcggtctcaatgaacggaggcacgccgagcagcagcgggttgctggcggcttcgaggtacagggtgaagctgccgtcttcggcgaccggcacttgcgcgttgccctcggcatctatgaacggcacccaatagttgagcgggtgtacggctttgatggcggtgccgtcggcgcggtagacgaggccctcgatatggccgccgcaggagtgcgggtaccagccgaggtcgaggatgagctccagcggcttgcctttcgggtagccggccggcacggtaccggtcaggcggaaccagactgtgccccatgtggtgccccattcactgccgagcgtaaacggcttgaaatcgatgtcacctcgattgagcttcgcgaagaactcgtcagtgggcatcggctctccgggaatgtcaaaggactccaccgcgagctgtgcgatcgatgggtggatatgagggtccacgcgctggcgcactatgcgcttgcaccgctccagttgctgttcaggtttcaggaacatctgctgttcactccccttatctctgccgcttgtgcggccacatcattgtgctgcccgttcatgggaaacatatcgacatgcgccctcgcccgcaggagactaaagcgctttagtaacatattggagggaacgggatatgatgtcaaattactatcgcaattcagcgtgttccgtcaggcatgtcatgctcggtgtcgatgacgatggtcaccggcccgtcattgaccagtccgacccgcatatgcgcgccgaaacgaccttccttcaccggcactcccccggagcgcaacgcctcgttgaacttgatccacatgagatcggcatgctcgggcttgccggccttgatgaagctcgggcgattgcccttgtgcacgtcggcgaacagcgtgaactgcgagatggagagaatctcgccgccgatgtcctgaatcgaacggttcatcttgccctgcgcatcctcgaacaccctgagattcagaatcttatgggccaaccaggcgatctgcttgtcgccgtcctcatcggtgacgcccaccagaatcatgaatcccgggccaatctgctgcggctcgaacgtgggatccagcgtgcccaattcattgaccacgtccacggacgcttcggatactcgttgcaatacgactttcatggttccctacagtacaacgtgtgcagtcaccagccggtaacgtacgcgaccgactggcgaccggcaatatctgcactgcagttcatcgtttaccgcttcattcgacgacgagaccgatagtcatcacgaacaccaccaagaaagtccggcgcgttgaggtcctcaaggtcagcacctccgcgcacggcggtcgcggcacaggcaacggcctcaaacgaggctttgattccctgtccatcggcatgaaaatcagtggcgcatcgcggtgagataccaaaatcgccagccgtctgttcggcgtcgatgttcgcgcccagaaacacaaactcccaatgatagcgttcacgctcataggtaatcatctgcttgatctgatgcaacgaatatcgacgactcgcgttctcatacccgtcagtaatgatgacaaacagcacatgttgagcacggtacgctgccgcagtatgtcgttgcgtcacgatcatgcggtcaatggccagcccaatcgcatccaacaacgcagtgctaccgcgcacccagtaatcccggctcgtcaaatcgttcacttcgcggatgtcgaggtgattatgcaaggtttcgattcgatgatcgaacagtagggtcgttaccctgcactcgccggcaattgttcgctgcttggacagcatgctgttgaagccaccgatggtgtctgattccagacctcccatcgatccgcttctgtcgacgacgaacaccagttccgtacggccgttattgccattgtcgttcttgcccatgatggatcctttcgctcattcgccagccggattgtcggcgatatcaatgagcttcgcatcatgggaccagtcctaggtcgcttggcaagcgacaatatgccgcgtatcggcagcaggtcaggagacgagcgtaccgctccgcatcattgcccaagcaacggctgatcgtatcggaacaacatctcgttaatagtgaatacatcaaacatctcatggacgatgaagaattccacgatcacatcgaatttcacgctgtgcgacagcgcatacccggcgcacgccaatatatcttgcgtctcgtcaatattcagccgtaaggcaatggccagtgccagaaccgttttcttgctgggcatatagccatcgccacagcgaatttcagagaacagtttacgattgatattcgctcgtttatatacctccacgtcggaatatcctttggcgtcgataagcctcaagagaatgatgttaaatatatgcgcgaagacgtttgtcaatactgctgcttatttcgaaagcggttttgtcgaatacgcataggtatacgtcgagatcgtgtccggagtcggctgcgtcgcccaggaatcggcgaatctcgtcgagggccacatgaagggcctcggctttcggatatccatagataccgctggaaatcaaggggaaggcgatgctggcacacccctgccgtgccgcgagttccatcgaattgcgatagcacgaacgcaacagacgttcttcatcatgcttgccgtctcgccatatcgggcctgcggtatgaatcacatagcgtgatggcaaattgaatcccggagtgataaccgcctcgccggtatgaatgggagcaaaccgatcgcaggcagcagccatgcgcgagactcccgcagcgcggaatatcgcgccgcacactcccccacccatggcgagctgcgtgtttgccgcattgactatggcgttcaccttcatcttcgtaatatcctgtcggaccaattccagcggcatatatcctccctgattacggcgtagcataatagcctctacacatcgtgcaatcggcagccctgaactaagtctaaatcgtttcttccccgcaagttcgtccaactgacatatccgacacgagagaatagcgggaaaacaaggaatcaacggagcaataacagaaagccgctcagccttactttcgtaaagccaagcggcttgtttccgccgaggcggattggtggaggcgcggggaattgaaccccggtccgatgaccgagcccacagtcttctacgtgcgtagtctgctggccaagttggcgatttttctgcccccatcgatgtcgcagacaactgatggcgagcatatccgcagttaaagtcccgatgcagccctgaggctcaactgcatcagcaagtcttctaaacgacgctcagcatcctcccaaagacgaggaggagtgaacggagcggctgctcactggttaatcctgactaaaaatcaggcagcgagagcgaactcagtgcggttagatttagcacttattcttttgccggggtcatccacgagcggacccggcgttctcggcacgcttccctgcagcgaacaggtcaccgtcgaaaccgatcgcccccaatcttgagttatcaagcttccggcttttcggccggacttttcagcatacaccctatggcgctactcgcgcaaatcgccagcagcgaacatcgccccggaaccaacggaaccaacgaagccaacgaaatcgccgtcacttgatgatgggcttctgggatgaggaaacatcaatctgatgtttcccggcaaagccagccgtgccagcggtgatgttcttgtcgatttcctcgacttccgccaacttcagcttcagttgcgaggagtcgccccaaatgattacgcggtcaccgtcgttaagcgtggtagtcaccgaatcctgcgtctcagcggtgaccttggtaatggacttacgcatcgattccggcaacgcgcccagaatcgtcagcgcctccttcaccgaacggttcttgagactggcgtctatatccttgacctcgatcaccgggatgccatccacgttggcgttcttcaccgagttcaacacacgcgcctgggaatccaccgcggtcagggtatcgcctcttttcagcatggccgcgggccgttgcgccttgacttccacgctcatcgacttggggaactgtttggagaccttggcctcgctgacgccgggaatggacttgagttgctctgtgacctcatgggcggagaccaggaacaacgactttccagcctgcttatcggcgatgacatggatggtctgcgcactcacccattcgttggcaccggatacgccgatctcgctggtttccagacgaaacaccgacgagaaaagcagcagccacgttagccccgtcactacagccacactgacgaccgcaatcaacacgcgtaacgcaacgacgcgcacgtttgcacgcttgcgttctttggcgcgttcggtgaaattcaccactttcgggcgtgatgcgactcctagggagccggtggtctgatgcagcgtttcggcaacgtaatcctcgctgtgcaaccgtcgtgcatcgacgaaggcaccggcctggcccttggctaccgtcacatcgtcgatgatctccggctcgtcgatctcatgcccggaagacacggaccggggagtgcgagacttcgacgagcgacccgtgtttccgcgtgaaccgatggtgcgcggcttgcgggagctcccagacgaacgacgtgagccgttgtcattgcccccggatctgaccgtgcgcccggacatcactcgcagctttcccgatgggcctcaagtgcggtgagcagcacctgatccatgtcggtgatgtcgcccgcgcccacggtgaagatcacgtcgccgtggtgggcgcgcatggccatcatcttggcggccaggcacatatcctcgatcggctgaatccacgtgcctgcggaagcatccttgagtcccgcagccgcgtccacgatggtggaggggctgatgtccgggaaatcggcctgcttttcacgggccgggaagatgccggtgataatgacgtcatcggctttggccaaggatttggcgaactggtgcgcgaagaacttggtgcgggagaacaggtgtggctggaagatcacacgaacggtcgaatcggggtaccggcgtcgggccgcatccagcagggccgcgatttcggtgggatggtgggcgtaatcgtccactacagtgacctgcttgaccgtgccgcgcacctggaagcggcgtgccgcaccgaggaatgtgccggccgccttggccgcgtctgcggggctcacgcccagcagcacggcagcgctgatggcggcggccgcattgcgcgcattgtgcacgccaggaaccttcagggcaacgctctgagacaccggctcccccgccgtcaccgcggccggcagatgcagggtgagctgttcgacgccgctgcctgcggtctcgctttccgaagcgatccagacatacgcggcaccgcccaaatcgggcagggattcacgcgcggtagtgccgtaggcaacggtatgggatttcacgtcggcgggcagggcctccagcacggcaagtccgtcggggtcgtcgatactgatgatcacgtgaccggtggcccggccggcgtgggcaacgaacgcggcacggtagtgggcttcgtcgccgtaatggtcgagatgatcggcttcacagttggtgataatggcgatggtcggatggtatttggcgaagctgccgtccgattcgtcggcttcggccaccaggatgtcgcctttgcctgcgtgtccgccgtccagcgtggtgccgtccgggccttggataaagccgccgatggcgtagcttggatcggcaccggcgttcaccagaatgtgggacagcatggagctggtggtggttttgccgtgcgctccggccacggtgacggctcgtttgccgttcatgagcagggcgaggatgtcactgcgatgcacaatgcgcttgcccgccgcgtgtgctgcgacgatttccggattgtccggtttgatggcgctggagtagaccacggtctcggcctgggcgacattttcggctcgctgcccgaattcaacggtgatgcccagcgtttcaagtcggtcggttttggcgctgtgtgcgcgatcggagccgtccaccgcgactccttcggcgtgcagcatttcggccagaacgctcataccggcaccgccgataccgatgaaatgggtggcaccgagatccgcggggcgggccgcagcatcgaatgaggcatacgtggggtcaagcactatgggctgatcttgagacaattcaaaactcctttagggattccagcaccctatattatgaccgtatctcgtgctgcggaacggaattggtcagtatcgcgcacggaatgatatctgaatactacttggatggttcggctaattgcagaacgtgccgggccatgatttcggcagcgtttctgatgccgtattcccatgccttgcggccgaattcggcaagtcgttcgtgatcggcgagcagatcgggcacatgctcatgcacccactgcggggtcaggtccttgtctgcgaccagaaggccgccgccggcgttcaccactggctcggcgttgaaacgctgctcgccgttgccgatgggcagcggcacgtaaatggccggcaggcccagtgcagccagctcggataccgatccggctccggcacggcaaatcaccaagtcggcacaggcaaaggccagatcgattcgttccagatattcggcggtatggtagtcaccttgtccggccgattcggggccgatgccggtaagcacgtccgcgccggccgaggccgtgaccagttcgcgtacttcgctgattttgcctcgcccggtcaagtggatgatttgtgcgtggaccaacaggtctgcggcggaggaggcgatggcgcggttcaggctttgcgctcccagcgatccgccagtgaccagcaccagcggacggttcggatcgacgccaagctgcgcggccgattcacggcgtacggcggcacggtcgtcaccgatgcgtttggtcagggaggcgatggccgggcgcaacggcagaccgacgcgctcgacgtcggctccggcacgcggtttgagaccggtgccctcgtacacggtaccgatgaaatcggcccaacgagcgcccagtttattggccatgccggcacgcgcattctgctcatggatggcaatcggaatgcccatcttgtgtgcggtggcgtagacgggggcggaagcatacccgccgaatccggccacgacatccgcatgccgcgtttcaagaatggagcgcaccttggcggtttctcgcttccattttgccgggaagcgcagcatgtacaggttagggcgacgcgggaacggcactttttcgatggtgtcgagctcgtagccggcctccggcaccaaatccttctccaaacccaccgcagtgccgatgacggtgacctgtgccgtgggttcgatgtcgcgaatcgccccggcgaccgcgagcagcggattgacatgtccggcggtaccgccgccagcaagaacgatatgtggtgtgccttgattcatgattaccgagtctacttacgcgctctgacgcgactgttttatctgcggttgagagcgcataagtcccacaaccagtccggccgccgtcaagcacataatcatggatgagccgcctgcggagacgaacggcataggcacgcccaataccgggaacacacccacgaccacgccgatgttgaccatggcctggcccacgatccaaatggtgacgcacatcagcaccatggcaacataacgatcggtgacctgcaatgcgatgacgatcatgcaccaggcgagaatcgcgaagaacagcaatacgatggcgcaaccgacgaatccggtctcctcgccgatgatcgcgaaaatgaaatcgttatgggcggccggcaggtaattccatttctcccgcgaattgccgatgcccaatcccagaaaacctccggaggcgatggcgtacttggcgtgaatggactggtagcatacgctctgcgcgtcagcggccgagcaatcgccatatgtggccagaatacgacgcaagcggttcgggctggaaaccgccaatgcaccgaccataaccaccgcgcccaatacgccgactcccatccatttgccggggaacccgacgatcagaaaggccacacctccgatgaagaccagaatcatggccgtgccgaggtccctgccgcccatcaccagtgccacgcctatcgcatacaacaccaacggcgcggcatatgctttgattcccttcttgtggtacatcttgctgcaggcatgcaacgacgagggaagccatatgcacatcgcgaacttcatgaattcggccggctggatagtggtgaagccgaggtccagccaacctctgttgccgtagacgtcgtgacccaaaggagtaaaggtcagcgcctgcaacaggcaggcacccaccacaaagaacacgccggtccgtttccagaacgtcaccggcatcatcaatgccacgaagcccagcaccaagccgatcaggcaaaacgcgccctggttcagaagctgaaggaacggcgacttgcccagtgcggccatggtgaccgtggagctggagaacaccatgatcaggccgaagcatgtcagccccaccacggccatgcggaagccgtggtagcaccatagcgggttgagcaagcttcgccaacccgtgtagtcggcgatttcgagtgagggcttgtcaggggctctgtatgccttacgcttatgggtatcagtggaggccatgcacctcgctccacgtcttggctgcggcggcgaatcgattgcctcgatccgcataggacttgaactggtccatggaggcgcaggccggagccataagcacgatgtcgccggcggcggcatacgtgccgcaggcttcgacggcacggtccatgacggtatcgttgtcttcgggatcgatgatggtcaccgggatgtccggagcttggctggcaaacgcttcgatcatcggctgctggtctttgccgatgatgacggccgctttgatggtgtgtgcctggtccttgaccaggtcctcgaatcgactgcccttggccagacctccggcaatccagatcacagacttggccgggaagctggacagcgaggcgcgtgccgcatggccgttggtggctttggaatcgtccacaaaacgaacagagccgccctcgactgcggcctcagccacggtttcgatgcgatggccgcccggcttgaacgaggtaagcgccttcaacgcggtatcgcgatcagcgccaagtcccagcaccaacgccaatgccgtcaatgcatcggccaccagatgcgggtacagtgagccgtccggctctgccagatgcgtgaaatcggtgatggcggccagtctgaccgactctcctactgcgccgccggccacgccgctcctgtccacgatccagccatcttcaatgccgatctggccggcttgaggggcctcgagcgtgaatcccaccttgcggcatccttcggcagtctgagcctcggccgccagttcgctgactttggcgtcctgcgcattgtagacgatggcgcgtttggcgttgtggaacaccttggatttgtcggcggcgtaattctcgcgcccgccatgccagtcgaggtgatcgtcggcgatattggtgatcgccgcgcagtcaagtgccagcgaatcggtgaagtgcaattggaaggagctcagttccacgcacagtacgtcgtgctgcggattggtggcgcaacgagacaggctcatgctcatgtctccggaggcgatattgccggcggtcggcgcgtcgagtccgcaggcggtgagcatttccgaggtcatctcggtggtggaggttttgccgttggtgccggtgatgccgatccatggagccggagtaccggtgcgctcgttattcacacgcagctgccatgcgaattccacctcgctcatcacggggatgccacggcgttgggcttccagcacgaacggggtgcgggggttgaacaccggggacgacatgacgtagtccacgtggtcccagtccacgtcatcaaaggagtggagatcggcctcgggcttcctctcgtcgacgccaatcacgtgggcgccgcgttccctcaatacctccgccaacgaggtgccggacacccccagtccggcaatcaccactgtcttatccgctacttgcattgttcctcctgatataggaattccgtgggtgagcataatccacccagatttccgctagctgaacagcaggccggagcgggtgacccagtcgccgtagaaaatcgtcagggcgagcagcacgaagatgagttcgatcatccagaaccgcaccaccaccttggtttcggtccaacccttcagttcgaaatgatggtgaatcggcgccattttgaatacacgtttgtgggtcatcttgaagtacccgacctggatgacgtcgctcatggcttccatgacgtacagtccacccagaaccaccgccaggaattcggtgtgcgtggcgatggacagggctgcgaacagaccgcccaaggccagggaaccggtatcacccatgaaaatcgatgcggggttcgagttgtaccacaggaagccgaagcaggcgacggccgcgcatacggcgatgacggtcagatcgagaggatcggacacggcataggaatatccgccatggctgccgcccttgatgtggtagctttcccagaatgcgatgacgccaaaaccagtgaaggcgatcatcgacgaacctgccgccagaccgtcaagtccatccgtcagattcactgcgttggtccatgcggtcatcaggaagttcacccagatgacgaacaggatgatggctacggcacggccggcgaagccgaagttgaagaacggctgttcgatgaagctgatgcctgcctgcgcactggggaatcccgatttggtgggaatcagcagcgcaagtaccgcgtagatggtggcgaagatgaactggccaatgaacttgccgcccaccgataggccttcgttctgcttcttacgcaccttggcgaagtcgtcgataaagcccagcagacccatcgacagcatggcgaacagtacgagcgccgcggaccaggagggcacgtcgcccgaacgcaggtatcggtacagtgcggaggatgcccaaccgagcagaatcgcgaagttgatgaccacgccgcccaacgtgggggtgccgcgcttgaccagatgcgactgcggcccatcctggcggatgtactggccatagtgcagcttgtggaccagccgaatcagcagcggggtgccgactaaggtgacgatgagcgacaccagcattccaatgatcagagcaatcacgtgcagcttctctttcttgtcggtttcttggggtggttatcaggtcagttctttgcccagcgttcagccaaagcgctcaggcctgacgcgtgcgatcccttgagcagtaccacagcgtcgggatggttgcgagccaagtcgatgaccagctgttcggccgcatcgatgtcgtgtacgcaatccaccgacgcggattggctctgacgggcaccgtccgccagagcctgtgccagtgcatcgagatgttggtcttgggcggaaccgaccgcgatgatcgcgtcgatgcccaattcgtccgcatacgtgccgatcgaggtgtgcaatgccgtttcatcggcgccgagttccagcatggcacccagcagcgccacgcggaacggctccttgccgtcatttgagttccaggccttcaacccgttcaggccggctttcatggagtcgggattggcgttgaaggaatcatcgatcagcgtgaaggaagtcccctcgcgattcaccgtggacaatgccatgcgatgagggctgatggtgtgctgcgaggccagaatccgtgccaccgtttcgggtgccataccgtaacgcatcgccacggttgcggcggccaacgcgttcatcacattgtgacgtccaggaatgcccagatgcaccggcgtatggttgccgtccgcatcgaccaacgtgaattcagcatgatcggaccggtcggcagtgacatcaatggcccgcacctcgggctcctgcgacgatcccaagccgaaccacagcacgtcgccgttggccaggccggccatgggaaccacgtgttcgtcatcggcgttcagtaccgcggtgcctccgggaagcaatccctgcacgatttcgcttttcgcctgtgcgatgcgttcgcgggagccgaattctccaaggtgagcgacgccgaccttcaatacgattgccgtgttcggcggtgcgatacgggtcagtcgcgcgatttcgccgatatggctggcacccatctcagccacgaagaaccgggtgtgctcatcgacccgcaacgcagtgagcggcaggccgatctcattgttgaacgatcccaccggagccacggtcggtcctacggtggcaagcagggaggagagcagatccttggtggtggtcttgcccaccgaaccggtcaatccgatgatgtcgaagtcgccgtccagctcgcggcggcgaacgatgttgtatcgggcgagttcgccaagggcgtcgaccgtgtctttcactacgatctgcggaaggccatcggacttcacctcatggtcgacgatggccaccgtggctccctgtccagcggttttcgccacaaagtcatgcccatcgacacgctcgcctcggatggccacaaacaccgatccggggccggcctgccgcgagtcgctgaccgtattggtggctcgagactcggaaccggcgtctccgatcaatcgaccatcgacggccttggcgatctcctccacgctcatcggaaccatggtgtttcaaactcctttacgattacgcttcgtcccgtatccacggacttaattgagattattggccacatgcagggcactgcgtatgttgtttttcctcacgccggcggccagcaccatggcgatggccaaggacatgtgcccgagtcggacgcggtcatacattgccggtgaatccgcagccatttcatccgattcgggtgtcgacgaggtcatggacatgtcatgttccgcaacgaatgcgtagcgtgtcttcaattcgttcaagcttgcgcttgcgttgacatcctccgtgcccagtacatccacgttcaccgattccaacgcatgctcggccaacgtgcggtcatccatggcgatgatcacggccgccacaccgtcttcggcgcacacggacagcgcgcgctgcatatcgaggatgcccagaggatagttcaggttcatggtacgtgtcatcgacgtggacccggatgcggtgattaccgccaccggattgcccagcatgtgcaggaattcggagagctgggacacgcctgcgtcgacggcctgctcatccgcaccggtcaccgcgaacaccgccatggcattggacggtccgccggccagaccgctggccagatcgccaagtacgcgatcgtcgaaatcgccgtagagcaacggtatatcggcattggcgatctgccctttggacgcgcgtggcagcaacgccgcataggcaccggcctgtgcggcatgcagtacatcgggttcctgctcatgcgtgcagatgaacagcgagccgggaatcacggtgtccacggcatcgctgagtgaggtaatggtgacattggtggcgaagggtggatcgacttcaaaaccgtaccgttcgaccagcattcccagggtcacccgctgggcgatggattcgctcactgcactcatgggctatcgcctttctcccctgatccttaccacgtgactggaatagcatttttgcgtggactggagacaggcacctcgtatttctgcataaggaactcacaaatctgtgcggaaacagggccggccgtcagaccgccgaacacaccattcggatccttcatcaccacggtgaccgcatagcgcgggttgtccgcgggaatcaccacggaataatcggagataatggacgagagcgtgccatccgagccctgcacctctgcggtaccggacttggcggccatgcggtaaccatcgaccttgacgaacttgttgtagccttccgccactgattccatcgcattcatcatgtccgatgcgaccttttcatccaccacgcgggtggcttcgcccttcttgctctcagtggtcttgccattggcatcggtggttgatttgatgatcgactgctgctgcttgacacccttgttcgcgatggtggccaccacgttgttgagctgcagggcgttgacggtgtagccctgaccaaacaggatggtgttgcgcgtacgcagatcccatgccgaggggttggtgagcagaccgctcgattcaccgggcaggttcagtccggtcggttgtccgatgccgaatttggtcaggtactcgtagcgttgctcatccggatagttctccccggccataatcatgccgacgttcgatgagttctgcagaatgccggcgagcgtccagcgctcagtgccatggtcgaatgagtccttgtaggtctggccctcctgtgtgatgtggtccgggaccgacaattgatcgctcatcttatgcagtcccatctgcagatagccggacatggagatgaccttgcccaccgaaccaggctcgaaggtttcggacacggcccgagacgggctcatcttcgccgcatcggtaccagcctgtacttcatcgctatcggccagtgcgagaatctccccgctctggacatcctgcaccacggcgatcgcccacgctgcaccatacttggattcggcctccttcaagacctttttgacataccattgcacatcacggtcaatggtcagggtgacatcgtcgccatttttggccgccaccgattcggtcatggtgccgggaatctcttcgccgccattaccacgctggtaggtttcatggccatcggttccggtaagcgtcttgttctcgacctgctcgatgccggcgacgccatcgccgttgtcgttcacgccgccaagcagcgcgcccatgagatcgccatccgcatacagtcgttcactgctcagctcaccccagacaataccgcccaggtgcaacgcctcgatgctgcgcttgacctgcggagtcacatctttcttcagaatcacatactgcccggtaccggacagatcagcgcccagttccatggcgttcatatccaggactttggccagcagccggcccacggccgccgctccggtagcgcccacgggtttgccgtcaatttcgtggcagtaatcacgggtgttgtcattgcaagtaatcggctcgaactcctgtgcagcctccggattggcgacgatagtataacgctccacgctttgagcgagcacggagccgttggcgtcgaggatacgcccacgtttggcgctcaacgtcacggtcagggtgcggttagccgtggccgcttgtgcggtttgacggccgccgatgagctgggtggaggccagctgaatcacgcatgccgacgccaccaacgccaatgcggcgccgatggcgatgcatttgaacgcgaaggtcttgaccttggcgaactctacgatgcgacgaatggtgttcactgggttccgcctttgttggactggtatccgcttaagtcgatggacactgatccctgctgcgggaccatgcccatgtcgctggccttgtcgggcaggttcgcgaccaattgatcgagtttggcctgatcgtcttcgatatcttgggtaagtctgttgatgttggtttcgatctgtgccgcctcaaacgagttctgcaccatctgggtacgcagcatcagcgcgccgaacaaggtgccgacgaggaagatcactgcaatggccacgtgcaccagcggtgcgcttcttgttctggtccattcgatgacccgtccgacgacattgccctgctcgtttccacgcgggttggagaccacccgcagctcaggtcgggaggaggactgatgcttggtgtgcggtcggttcgaggctggagccgcgttcgatcgaatgctacgtgcagttgccatatgctgttatcccctccttgtacgaattcgtgccgtgtttttggctctgcccggagacgcggagccttgtatcttgacgtcattcaggccctgcgcggtttgcgtaaagcgtttcctccatcgtgacggaatctcacggctgacttccaccgcccgcaaccgcaccgaagccgatctcgggttggctgcgatttcatgttcgtcggccttgatggcacctcgcgtgagatccgtgaaaaacggttgggcatccggcggtatgacaggcaggccagccggaacatccactcgcagcccttgtgccatgaacgatttgacggttttgtcttcgagcgaatgataggactccaccaccagtcgtcccccgacatgcagtcggttcgcggcctgcggcaatgtggaggcgagcttgtccaattcgccgttgacttcaatgcgcaacgcctggaagacgcgtttggcgggattgcccgccgggcggtgggcttgcggcaccacttcatcgaccagacggttgagctgtgcggtggtggtaaacgactccttgtctcgacgcgccacgatggcgcgggcgatctgacgcgagaaacgctcttcaccgtattccttgaatatgcggaccagttccgccgcatcataggtggcaagaatccgttcggccgtcaacggctggctgacgtccatgcgcatatccagcggcgcatcatgcgaataggagaagccacgatcggtttcgtcgatctgcaggctggataatcccagatccatgaatacggcgtccacgcgttcgatgtcttggtccgccaacacctgatcgagctgatcgaaggcggcatgcaccggaatgaatcgatcggcgagcccctcccgttccatacgttcggtggccagccccagcgcttcactgtcacggtcaatgccgatgagccgagcctgaggcgcggccttgaggaaggcgatggaatggccggcaaggcccagggtgcaatccactgcgatggcgttctcatgttccagggcaggtgccatcaggttcacgcaatcgtcaagcaataccggcagatgaatattcgccacatcaaccatcagaattccacctccggcaacacatcgtcagcaatatcggaatatccctcttccttctcggcgaggtaggactcccacgtgtccttattccacagttcggcacgggtgccaacgccgatcaccacgacgtcggaacccagattggcgtaatcgcgcagcatctgcggcaccagcacgcggccctgcttgtccggctgctggtcgacggcaccggaaaggaacacacgcaggtattcgcgggcggctttgtttcccaccgacacacgctgaatctgcgaggcgatacgtcgaaattcgtcgaacggcagcaggtacacgcaccgttcctggcctcgggccatgaccaggccctgccccagctgggagcggaatttggccggaagcgccatacggcccttggcatcgatcttcggcgtatatgtgccgagaagcaatggcggcagaccagccatgagatcggccatagtggtggagccttgtgcgttggcatcagcgtcgcgaatcgtctgatcggcaaccatggctccacctccttcatcgttacgtgggatacacttcggccaactggctcaccactctaccccacgattccccatttctccccactcatgcacgatttgctcacccttttagggcaattaccgatggattgcgcgtgtcggccacgactgtcgcacgaatggacgctccgcacatccaatccacgtcgcgcaccccaccgaccgagcagcatggtgaattcacgctgaattcacctattccgagttgtccgcatcactgacgtagggggtgtgcggtaaatttgaatgccttaagtttttctgccccacggaaatggaacgaagagaacagcatgtcgagttacgcctcccagctgcatgaagagcagcaggccgtcgatcgcgcctacggacgattggatgatctgcgagccgaaatgtggcaacgcctggacaccgtacgcgccgccggctcccacggatcccccacgcaacgcagcgaacgagactcctttgccacaatgtacgaaaaccgcctcacgcaattgcgcagcgttgaggatcggctggtgtttggccgtctcgatgccaagaacggcgaccgtcattacatcggccgcatcggcctgtcgagcccggaccatgagccgattctgaccgactggcgtgccgaagccgcacgtcctttctatgaggcgaccccttccaatcacggcgacatcgtgatgcgcaggcatatcaccttgagtttccgcgaagtcgtgggcgttgaggatgaggtgctcgacgtgcattcagaccaggtcggccaggcgtcttccgccggcacattgaccggcgagggtgcgctgctggcttcgttgagctcacgccgcaccggcaaaatgaccgatatcgtggccaccattcaggccgagcaggaccgcatcatccgctccgacatgaatcgcgccgtggtggtgcagggcggccccggcaccggcaagacggccgtggcgctccatcgcgccgcctacctgctgtacacgcaccggcgcacgctggaacgttccggcgtgctggttgttggccccagctcggcgttcctgcactacatcgatcaggtgctaccctccttgggcgagaccggcgtggtctcacgcaccatcagcgatctgattcccggcatcaccgccacggcggtcgactccccttatgcagccaagctcaagggcgatcgacgcatgacctccgtagtggccaatgccatcgccgcacgcgtgcgtgttcccgctgctctgccgacagtaaccattagcggcattcaggtaccaatgctggccactgatatcgagcaggcgcaggcggacgcgaagcgcacccgacaacctcataacaaggcccgcgagacctttatccgttcgatgctgaccagcatgcagaaccgttatgccgaacagcttgattacacgccggatcaggcggagctgaaccgcgcgatgtcgctgctacgtatgaacgagcaggttcgcaagaccctgaacctgtgctggctgccgatgaccgccccatggctcatcgatcagctgttcgcccatcccgaacgtctgaagtctctggctggttggctgaccgacaacgacatcgcggcacttgcccgtcccaaaggctccccgttgacccgctccgatattccgctgctcgacgaagcaatggatatgctgggccccgatcccaaggcggtggcccgccagtccgtcgccgacgcacgtcgtgccgccgaagagcagtatgccaaagacactctggccgcgaccggtctgggtggaggcatcgtctccagtcagatgctgctcgaccagatgaacggggacgacgctgagctgaccgcgcagcgggccgcggccgaccgtgaatggacctacgggcacatcgtggtcgatgaagcgcaggaattgaccgccatggactggcgtatgttgatccgccgttgcccctcccgctcgttcaccatcgtgggcgatgtggcgcagacttcggcgctgggtggcacccgacgctggagcaaatcgatgaaccgcctgttcggcgaaagccactgggatttgaacgagttgaccatcaactaccgtaatccgcaggaagtttccgaacttgcctcacgttttgccgaggaggaaggcctctacatctccacggtcaatgcggtgcgcaccatccccgattcggtgtcccgcaatgtggtgcccgacatgtcgtccttgctggaaacgacggccgagcaggcggcgcagcttgccgaacaattcgtttcggcagacggcaccggccgcatcgccgtcatctgtcctgataatctcatcgccccggtgcgcgatgccgtgcgccgcaaactggctgtcattcttgacccggccgaatacgcaaggctcatcgagcagcccgaatgggatgagcaaatcagcgtctgcggcactgaaacggtcaagggtctggagttcgatgccgtcgtggtggtcgagcccggtctcatcgaggatgacgcgccgagccgcctggtcgccgcctcggacctgtacgtggcaatgaccaggccgacccagaaactggttatagttcggacaaaagcggacgaaaagtccctgaacatctaaggtatgaagcatgcccaaagcactgttattggaaaacattcaccccgatgcggccaaatcgctgcgtgatcgcggtttcgaagtcgagaccatgaagggagccctgagcgaggacgaactcatcgatgcgctggatggcgtggacttggtgggcgtacgctccaagaccaacgtcacagcccgcgtgctggatgcgcgtcctacgctaagcgccatcggctgcttctgcatcggcaccaatcaggtcgatctggcacatgccggcaagcgtggcatcgccgtgttcaacgctccctactccaacacccgttccgtggtggaattggtgatctgcgacatcatctgcttgatgcgccgcattcccgcacacacgcatcacatcaagcatggcctgtgggacaagtccgcttccggctcgcatgaagtgcgcggcaagaccctcggcatcatcggctacggcaacatcggctcccagctgtcagtactggccgaggccctcggcatgcgcgtggtgttctacgacattgaggagaaactggcactgggcaacgcccaccgttgcgacaccctcaacgaactgctggaacagtccgatgccgtgaccctgcacgtggatggccgcaagtcgaacaccggcttcttcggcgaagaccaattcgcccacatgaagcaggacgcgattttcattaacctttcgcgcggtttcgtcgccgatctgggagctctgaagcagcacctcgattccggccatctgtctggcgcggcggtcgacgtgttccccgttgagccgaagaagagcggagatccgttcgagacttcactggccaatgaagacaatatgattctgactcctcatattggcggctccaccttggaagctcaggaatccatcggccatttcgtctctcagcgtcttgaggattactggttcaagggttctacctccttgtccgtgaacctaccgcagatcaacctcggtgagtgcaagggtgtgtgccgtatcgcccatctgcacgacaatcttcctggtgtgctggctcatgtcaatcatgtgctcggcgaggagaacatcaacgtttccttccagtcgctggcaaccgaaggcgaactcggctatgtggtcaccgacgtggctcagaagcccagcgccgccacgcttgaagcactgcgcaacatcgaaggcaccattcgcatgcgtgtcatcagctgacgcagctcatcctcgattgatatgaaagagacccgtcatcatgacgggtctttttcataagtgctgggcttcatgattggctcgcaccatggtttgcgaatcactcgcatatcacggtgcatggcattcgcatattattcacgcaaaccatcaatggcgctttggaaatcctccagacctgcaaagttctggtacacactcgcgaatcgaaggtacgccaccacatccaagtcacgcaacggtttcaggatggctttgcccacttcatctgaggtgacttcggcaaggcctcgggagcgaagatcctcttcgactttctgtcccagcagcttgagatcctcttctctgaccggccgcccctgacaagctttgcgtacgccggaaatcactttgtctctactgaatggctccacgccacccgaacgtttagtgaccagcagcatactggtttccaccgtggtaaaacgcttgctgcatttcgggcatacgcgacgccgacggatggaatgaccgtcatcgctaatgcgcgtatcaatgactttggtgtcggggttctggcaaaaaggacaatgcatgctccccagaataacgtgtacgggcggaaaaaccatgccgctcgggtttcatttactcaaccggaacaataatgcgctgcccggcctgcaatgatccggactcaagattgttcaacgcaatcagctcatccaccgtttccgatacatcatgaccagcaggcgtgatagccgaagcatatgaccagagcgtatcccccggccgcacgatataactggtcacctgcgtggcccccgtatccgattgggcccgctgaacggtaagcgcgccgaaaccacaccaggccagcgccaaggcgaccatcactgcgataatcttcccacgcacattccggcgggacgttccagcatgctgcatagctacacgtgcgctacgggccggggccatcaccattgaaccagtcatcacgaccacctctctcgaacagatgttctatcgaacaactgttcttataatggcacaaacgttcgacacggtcaagtcaaaactcgaacagatgtttgatttcacacgaacaacacgttatgctggtgacataacgaaaggagccctgacgtgagcaccattcccttctcccccaagcagaagccggacgagtccaccctgaccgaccgccagcgcaaagtgttggacgccattcgcacgcatatcgacgaacaaggcttcgctccctctttccgggaaatcggaaatgccgccgggctcaaaagtccgtcttcggtcaagcatcagctacaagttttggaagacaagggcttcatccgcatgaacgcgaacaagggtcgagccatcgaggtggtggcaggatccgccccgaatgccgaaaagccctcccaagccagcgaagaggcaaccagcaccagtaatgtggcggagatataccaattccccgccgaagccattgccgaatcacacgatgtgccgctcgttggccgtattgccgccggtgtgccaattaccgccgaacagcatgtggacgacgtcatgcgtctgccggaacggctgaccggctccggcaccctgttcatgctggaagtccacggcgattccatggtggatgccgctatctgcgatggcgactatgtggtggtgcgcgaacagaattccgccgtcaacggagatatcgtcgccgctctgctggacgacgaggccacggtgaagaccttccgcaaggaaaacggccatgtctggctgatgccgcacaaccccgcatactcgcccatcgacggcacacatgccacgattatgggcaaggtggtcaccgtgctgcgcaaattgtagcctgttcgccaccagctgatcagcgtgcaccgaatcgcgctggtcgtgctatagtcgcgcacagcttacgaaaccctggcctcgcgccggggtttcgtcgtattcagaccatatcgcaaatagtattgagaagcggtttcaactcgatagagcgaaggagtacatatggctcatacccatgcacccgcaccatccacatccataaaccctgccgcgcaccagcgtaggctgattgccacgttgaccgtaaccggttcggtcttcctcatcgaaatggtgtcggctgtcttaaccggctcattggccctgctggtggatgccggtcatatgctcaccgacatgtccgtgctggcggcatccacaatcaccgccatactgatgcgccgcaagcccagcaacactcgtacttggggctgggccaggcttgaggtgctcaccgctgccgcaggtgccgtggtgctgctcgtcgttggcatctatgcgttggtggaggccggcatgcgtctgttcggcggttccaaagcggaaatcgacgatatcggcttgctgctgttcgtgggcattctgggtcttgccgcaaatatcatctcgattttcatccttgcctcgcagcgcgaagacaacatgaatatgaaggccgcgttcctcgaggtgatgaatgacgcacttggctcggtggccgtggtggcctctgccctggtaatgatctccaccggatggaatggcttcgacgccgtggccggtgccgtcatcgcactgatgatgattccgcgcgccatcaagttgctgcacaacgcggtcaaggtgctgctggaggaaacaccggatggacttgacctcgataaggtacgcgaacatctggaagacgtgccgcatgtgcttgccgtgcatgacctccacgccagcacggtgtccaccggcatgccgattctgatggcccacgtggtagttgacaaagacctcaccatggaagatgccgccacaatcctcacccaactgcaggattgcctgcgcgagcacttcccggtctcggtcccccacaccaccttccagctcgagcccgagggctatagctccccctcctccaacgaactccacgaataaaaaatgctcccaatgggagcattcagcagggtataaaaaatcgctgtatgtgtgcgattttcgtgccgcacaagttgaaggcctacaaaggtaagtcgagtcttgtgcggtgcgaaaggcgctccgtacagcgattttttatcagaagccgaactgggcggcggtttccttcagcgtctcggcagagcgcttcagagcggcgagctccttgtcggagaccggggtgttgatggtgttgttgacgccctgacggttgaggagggtcggcacggacatgcagatgtcggagatgccgtggaagtccttgagcatggagctcacgggcaggatgcggttggtgtcgtgcaggacggcttcgatgatgtcgacgccggacatgccgatggcgtagttggtggcacccttaccgttgatgatcttgtaagcggcgttcttgacttcctggtggatctcctcgcgcttgtcggcgtcgagcggatcgtggccgggcagcggggtccagtcgcacatggggacgccaccgatggtggcggactcccacagcgggacttcggagtcgccgtgctcaccggcgatgtaagcgtgcacgttcttgacgttgacgccggtctgctgggcaatcaggaagcgcagacgagcggagtccaggttggtgccggaaccgaagatctggttctcgggcagaccggtgagcttctgagccacgtgggtagcgatgtcgaccgggttggtgatgagcatgtagatggcgttcggagccaccttgaccaggttcggcatgatggccttgaggatgttgacggtagcgccaacgagctcaagacgagactgacccggcttctgacgcggaccagcggtgatgacgaccatgtcggcgtcgcggcagatctcaggatcgtcggaaccgtcgatggacacggtcgggtagaagctggagccatgctgcatgtcgagcacttcggcttccacgcgctccttggcgatgtcttcaagcacgatctcgcgagcgatgccacgctgggcagcggcgaaggcgagggtggagccaacggcaccggcaccaataacagcaagcttcgtgggcttaacggtagtttccgccatgatggatgaacctctcttcaaaggcggtctgctgatgaatggcaggccttgtaactaacgtcttcactctataaacccgctaagacgttttgctaccagcacgccaccctgtttgataaccgtatggtaatgttttcaacggttgttagcgctcacgaatatactgtgatgtttatcacgttagtcaatggactgttcgaccacctgagcggcaagatgggcgtcaacgtccgcttcaagctgtatgccatcatcgcggtactccaccttgtctaccttgccgtattcgcgtacacgagagatcagggagccagcggtatacggcagcagagcgttgacatgcacatgcgggaccggcagcagactttcgaccgcggtacgcagctcgtccaatccctcaccggtataggcggagacgatgaacgcatctggctgcagcgcggcgagtcgttcacgagtcgcctcgtccgcctgatcggccttgttgaatacgagaatacgcggaatcgaggccgtaccttcgatgtccgccaacacgtcattgaccgcgtcgacctgagagaacgggtcagggtgggagccatcgaccacatgcaggatcacgtcggcctcggccacctcttccagggtggatttgaacgcctcgaccagctgggtgggcaggcggcgcacgaagccgaccgtgtccacgtaggcgtaggcgcgtccgtcgcgggttttggcgcggcgcacggccgtgtccaatgtggcgaacagcgcgttttccactagttcggccgaaccggtcagacggttggtcaacgaggatttgccggcgttcgtgtagccgaccacggccactgtgggcaggccgaagcgacggcgtgaaccgcgcttgacctcacgtgccggggccatctcacgaatctgacggcgcagtctggcgatacgcgtgcgaattacacgacggtccatttcgattttggtctcgcccgggcctcgcgatccgatgcccgcatccgcgccggccgcgcgaccgccggcctgacgggacaacgaaccaccccaaccacgcagtcggggcagcatgtattcgagctgcgccaactccacctgcgccttaccttcacgcgaggtggcgtgctgggcgaagatgtccagaatcaccgcggtgcgatccaccaccttgactttggcggcgtcctccaatgcacggcgctgtgacggcggcaggtcgtcgtccacgataatcgtatcggcttcctcacgcgccacgatgtcggcaatctccttggctttgccggaaccaacatacgtggctgcatccggcttggagcgatgctgcagcaaaccatcgcataccaccgcaccggcggtttcggcgagcgccgccaactctctcaatgattcctcggccttggcttgcgtggtgacggcggacgaccagacgccgacgagcaccacacgttccagacgcaccttgcggtattcgacttcggtgacgtcctgcagctcgccgagaccggcgacatgcttgagctcgttgcgggcctcgcgctcctcccattcctggttggcgtcctcatgccagccggtcgcgcgctggctgtcgtcgagcagcacttcggactgctcggccagcacaccttcaggggtaacgtcgttgttgccgcggttgatgtcggtgtactgggtgttgtcggtcaagtgcgcctcgtttggttggaatggttcacgattcttctatggtcctttattatcatcacatgaggtgacatgctggcatagctcggcacgtaccggcataggccggctgatacaggtcggcatacgagagcggcgaatcccgcagaaatggagcgaccatggcagaacagtatttctctgcggaacccgcatcgaaggatgtgcgccgcacattgaacgtaacgttgcgcggccatgaggcgaccgctcaggtgtcgaacggcgtgttctccggctcgcgcgtggacctcggtacgtcggtattgctgaagcatgcgcccgagccgccgcttaccggcgattttctggatttgggctgcggctggggccctatcgccctgacattggcgtttgagtcgcccgaagcgaacgtgtgggcggtggatgtcaacgagcgcgcgctggacctgacccatgccaacgcacaggcgaacggccacacgaacattcatacggctcaggtggacgagtccagcactcccctgcctgccgagaaccagccggcgttctgcgagacggtgccgagcgacctcacgtttgatgtgatttggtcgaacccaccgatccgagtcggcaaggaagcgctgcatacattgcttatggcttggctgccgaagctcaaggtgggcggtgccgcctatctcgtagtgcagaagaatctcggttccgattcgctgatcccctggctggacgatgccctcggcgaggggttcactgcgagcaaatacgcgagctccaagggcttccgtatcattgaagttcgtcatgaaatatgagtatcccgcagaacttcccgtatctgccgcgcgtgatgagatagccagcgcggtcaaacgttcccaagtcgttattgtgtccggccagaccggttcgggcaaaaccacacagctgccgaaaatcctgcttgagcttggccgtggcacgcacggcaagcagatcgtgcacacccagcctcgccgtatcgccgcacgcacggtggccgaacgtatcgcctcggagatgggcgtgaagctcggtgacgaggtcggctatcaggtgcgtttcaccgacgaaagctcgcccagcacacgattgagggtcgtgaccgacggtattctgctcgcccagatccagcgcgatccgaaactcacccgatacgatacgatcatcatcgacgaggcgcatgagcgcagtcttaacatcgactttctgctcggctatctgacggcactgctgcctcagcgccgcgatctgaagctcatcattacctccgcgaccatcgattcggtcaagttccaggagcatttcgagcacgccttgcatgagaaggtgccggtaatcgaggtttccggccgcaccttccccgtgcaggtggtctacgagccgcttggcaccgcgcccgcgttgatgcgcgaagtgccgggattcgcggtgggcgcccgccccggcgacgccgattacgacgagctggccagcgccatcgcggaatccgattccgaccggccccgcggccggtccggtgcctcctatgccgatgacggtatcaccgatatgcctaccgccgtggctcgagcctgcgccgagctggtgattcactcctcccacgagcgcggtccccgcgatattctggtcttcgcctccggcgagcgcgacatccacgagttcgaggccgcactgcggcatcattacggcccgcgcgccgacgacatgcgccggccggatgccatcgagatcatgccgctgttcgcgcgactgtccgccgccgaccagcataaggtgtttgaatcgcaccttcaccagcgcatcgtcattgccaccaatgtggctgagacctcgctgaccgtgcccggtatccggtatgtggtggaccccggttccgcccgtatctcccggtattcgaagaccgcaaaggttcagcgtctgccgatcgagccgatcagccaggccagtgccgaccagaggtccggccgatgcggccgcgtggccgacggtatcgcgatccgcctgtattcgcgtgaggattacgaaacccgaccgcgcttcaccgagccggaaatcctgcgtacctcgctgggtgccgtggtactccacatgctgtcggtgggcgtggcccgcacggccgaggacgtcacgaacttcgggttcatcgatccgccggatatgaaggccgtgtcggacggtttcaatgagctcaccgagctcaaggccatcggccgcaagcgcggcgaggtgacgctcacccataccggccgtcagctggcgcgcatccccatcgacgtgcgtctgggacgtatggttatcgaggccgcgaaaaccggttcgccgaatcttctggcccaggtgctcgtggtcgtggcgttcctgagcttgcaggacccacgtgaacgcccggacgacaagcgtgaggatgccgaccgcatccacaaccggtatgcggatgagacctccgacttcctgacggccctgaatatctgggatcgcgtgttccaagcagacggcgacccgagcaacaacgcgctgcgccgtatctgcaaaaccgagtatttcagctggctgaggatgcgccagtggaaagatctcgtctcccagctacgccagatgtgcaaggagctgaagttcaaggtcggcgacccgctgcccacctcccgcccaggcttggagatccgccagctgccgttgaaccagcaggccgcgcattcgctgtgctgcgcgtgggatgcggacggcatccacaagtcgatgctcgccggattgctgtcgatgatgggcatgcaggtggtgcgcgagcccaaggcctccgatttcgcggggctgaccggttcggcgcgcgcccgtgcgatgaaacgcgcccagaagcagtcgaagaacgattatcagggcgcacgcggcacccgtttcgccctgttccccgcttccgccgtggccaagaagaccccgtcatgggtgatgagcaccgaactggtggaaacctctcgcctgtgggcccgctattcggcggccatcgaccccgcgtgggccgaaccgttggccggccaattgacccgcaccacgtatgcggagccgcactggtcgggttcgcgtggctcggctgtggccaccgcgcgcgtgctgctgtatggtctgccgatcgtacaggaccgtgccgtgcagtggggacgcatcaatccacttgaggcgcgcgacttcctgattcgccagggtctggtcgagggcgatattcagcagcgtttcagttacgacgacttcgtgggcaaaaaccgcgacattctcgaggatgccgccgatgatgcgagccgcacccgccagctggcggataccgtgtccgacgaggatctgttcgacttctacaacgcggtcattcccaacgatgtgaccagcgtggccgatctggcgaaatggtggaagtccgagcatgaccgtcagccgaatctgcttgatttcgacccggccaaggtggagcgtctggcatccagcgattcggtgagtctggacgattaccccgaccattggcatacgaccggatcggacggccaacccatcgacctgcgtctgagctacgtgtacgatccggccgacccggccgacggcgtcaccgtgcatgtgccgttgaaggcgctctcgcgtatcacgcccgaccagttcacatggaatgtgccgggtctgttggatgagctgatcctgtcgatgatcaaggcgctgcccaagcagctgcgcgtccagttcgtgccggccccggatgccgcgcgtgcgattcgtgactggatcgacgagcattacccggatctgccgggctcgggctcgcagcagaagccgaatctgccgccggtggatgaggatggcacgaccgttggctggcccgatctggcacatgtgttcaccaaggcggccatcgccaccaagggtgcgcagattcatcccgaagtgttggggccggaactggtcgagcgtctttccccgtatctcagagtcacgttctcggtggagcagcaactgccggccggcaagcaccctcgtggacgccggcatgcgcgcggccccatcaaggtgctgggtgtgtccaaggatctgaaggcgctgcaacgcaagttcgccgcgcaggcggaggcgtcggcccgtcaaatggtcaagaagcaggccgatcaggctggagaacagggcaagctggtcagtcaggcgaacctgttgcataaggcgggtgccaccaccgagtcccgggccacgatgctctggcgtggcgcattggatgcgttgcgattgccggccgaacgcatttcgtcgcgctggctgggtaccgaggcgttgatgctggcttctgctccgtacaagtccaccaaggatctggtcgaagacctgcagctggccacggtcaaacggctgatgccgaatgtcgacaggctctcggacgatgaggcgttagccaatgcggtgctcgatgtgcgcgaagtgtacgaggacaccgtctatcaggtggcgcatgacgtgatcgccgtgctcaaggcttatgccgaggtcgacaaggccactggcggcaaggctgatctgccgatgctttcggtgttgcagtcgattcgcgaccatatcgccacgctcgtctaccccggattcatcgggcgcactcccccggatgcgctgaagtcgttgagccgatatttgagagccgatctgagccgactcaataaggcgaaaaccgataagaaccgtgatgtcaagtgggcttggcaggccgacgaggcccgtcaggtggttgataaggcgttggcccgtgccaaggcggagccggccggcccgaagcatgaggcattgatgaagcaggccgaacaggcccgttggatgcttgaagagttctacgtgtccctatgggcgcaggagcttggcaccaaggggccggcttcgctcaaccgtatcaagaaagcgctggcgtgaccggacggcaaacaagtcgccaggccacgcgccagcgcacgcgcaagccgtcatcacagcgtgggcaagtgcgcggacgcctcggcaatcggaacaggaaacgcaatcgtaggcacggtccgatcaatgctctgaagcgttcctggcgtaaggcgaactggccgacccgtatcaagatggtgctgattcccacggtggcggtggtcgttgtcgtagcgctggtggccgggctggttcgtttcacaaactggcgggcacaggttcgcgcagccgaggcggcacagctggaactgacgcgaacatacgatttcaatccgggcaatattatttcggatggtcagttcttcaacggttcggcgatgagtcaggccgaagtccaatcgtttttggacacacaaggtggctcgctggccgcgatgaccttcgacacatcgaacgagtcaggcgaaggcctgtgcgcggactatacaggcaccaaaggcgagtcggcggcggcaatcatcgaccagtcggcccgcgcctgcaaggtgagccagaaagtgctgctcaccgtgatgcagaaggagcagcatctggtcactgccgtcgatcccagcgactatcagcttatggcggcgatggggttgaactgtccggataccgccgactgcgatcccgcctatgccggattctttcggcaggtgtatggcgcggccaagcggtaccgttactatctcgagcacgaggaacagtacgggtatacggcgcacaatctcaactacatccaatatcatccgaacgcggcatgcggcggcgcacaagtgtatatcgagaacaaggcgaccgccctgctctacatctatacgccctaccagccgaacatcgccgcactggccgctggcaacggtaccggcgattcctgctccagttatggcaaccgcaacttcgcgcttatctacaccagctggttcggttcgccgcgaagctgataacggcagctgaccggtcttgtccgattggactcggccaacactgtcagcgttcgacgtatggacgcagcagggtcgtggcaccaaccgccagcagcgaggcgaaagccagcagacacaggcagacggcctgcacgcagtagatcggtcgaatgtgggtcaatggttccacgccatgacctttgtcggccagcttgccgccgtacaggttgctccacaggcaggcgcagccgtaaatcaccaagccgatgctgatatagcgttcgggcacgccgatttcgtcgcgcatgatcggcgaaagatacgtgtagaagacataggaggcggctgcgccgaagaccacatccgccacgccgagctggatgcggcggtcgaagaacaggcggaattgcctcaggaaaccgatcttcgccggatgcgagttgcgtggcagagacactgccatcgatgccatcagcacggcggtgagcaccgagaccaaggcaaaggtgacacgccaaccaaaggtatcggccacccaagtgccggccggtacgcgcggtgttcgcaggtgcgttcgtcatgggtgctctcttgagtgctctcgctcgtactacaagctgattcgtcggttatgtcaatagttttttcgtatcaactcagcgacaacgttattcccacctctgcccactacccaccaccacgacacgccatagaaaaccccgccgatgaccaatcatcgacggggtttggcacatgtgcaacgcttgcgattacagcttcggcagatacttcttcagctcgtaaggcgtgacctgctggttgtactcctcccattcctggtgcttgttgtccaggaagtagccgaaggcgtgttcgccgagcacgtcggccacgaagtcggatttctccatgatcttcagcgcctcgtccagcgagcgcggcagcggctgaatgcccatagcctgacgttcgccgtcggtgagctcccacacgtcatcactggtaggctcgcccaactgcatctgcttatcgataccgtcgagaccggcggccagcagcaccgagtaggcaaggtatgggttggccaccgggtcgagcgcacggaactccatgcgcgcggagttgcccttgcccggcttgtactgcgggatacgcagcagcgcggaacggttgttgtggccccagcagatgtagcttggtgcctcgttaccgccccacaggcgcttgtacgagttgacgtactggtcggtgaccgcgcagatttcggccgcatggtacaggatgccggcggcgaactggcgggcggtcagggacatgttgaactcctgaccggcctcgtagaaggcgttggaatcgccttcgaacaggctcaggtgcgtgtgcatgccggaaccgggcgcgtcggccaggggcttgggcatgaagctggcgtgaatgccacgctccaaggaaatctccttgaccaccgtacggaatgtcatgatgttgtcggccatggtgagcgcgtccgcgtatcgcagatcgatctcgttctggcctggccccgcctcatggtgcgagtattccaccgagatgcccatttgctcgagcatgttcacggtggcacggcggaagtccatgcctgggctgcgcggcacgtggtcgaagtagccgccctcgtcgatcggggtcggggccttggaccagtcgtcctggctttcgaacaggtagaactcgatttccggatgcacgtagaacgtgaagcccttgtccttggctttggcgagcgtgcgcttcaacacgtgacgtggatcgccgagcgaaggctcgccgtccggggtcagaatgtcgcagaacatgcgggcggtaccttgcgggccaccgcgccacggcaggatctggaacgtcgagggatcgggttgaacgatcatatcgtcttcggacacgcgggtcatgccctcgatggcggaaccgtcgaagccgaggccctcctcaaacgcggcttccagttcggccggagcaatcgccacggacttcagtgttcccaacacgtccgtgaaccacagacgaataaagcgcacgtcgcgttcttcgaccgtgcgcagcgcaaactcctgctgtttatccatagtcgcctatcgttccataaccgtgttacgaagggcgttaacatctcactgttcgtcacctgcgagtcgcgagatttcatcaacatgccccggtccgcatgtcaggcatggttcaggcccatgccggcacggcactatggtagtgactatgagcgaagatcatctcaccccatccgccaatccgcccgagctggtgccgatcaatcagctggatgattacgccgacttggatgcgttgcaggcacgtatagacacgctgttcgagagctaccggcattccctgtacgacgatcgccgttgggtgttcaatcatttgcgctatcaggatgcggcccgcaaggtggtgggcgtgggctcggtgggccagcgcgcgtggacgtcggtgtggatcgcgcgtgatatcgacgatccgatgatgattcagatgaaggaggccacgtattccgtgctcgagcattactgcggcgcgtcgccgtacgccacgcacggtgagcgcgtggttcaggggcagaagctgattcagaatacggccgatgtgctgttgggttggtcgagctttatggccgaggatggccgaccgcgcgactattacgtgcgccagttgtggaatggcaaggggtcgattgatatcgacaatctcaacgcttcgggattgagcgatctgtcacgcatgtgcgcatggtcgttggcgcacgcccacgcccgcaccggcgattcgattgcgatcgccaattacatgggtggcaccgacgaattcgatcaggccatcgcctcattcgccgtcagctacgccgaacagaatgatgaagactacgccgtcttcaaaaagctcctcaaatccggcgacctcccttgctgagccgttaagcggacagcccaatgggctgtccgtaggaggggtctgagtgaagcgatagctgagcgaaggtagattaacagtctcgctaaggcgagtcctttgcctacttcgctacttcaagcgcttcctggagcgtgaacgcacgtgcatagagggacttgccgaggatggcagaatcaacaccaatttcagccagttccttgatggcgcgcaaatcgtccagcttggagataccaccggaagccgtgaccttggcgtcggtgcgttcagcgacttcactcagcaattgaatgttcgggccggacatcatgccgtccttagccacgtcggttaccacgtaacgcgagcagcccacggagtcaaggaacttcatggtctcaaacaggtcgccgccttcgcgcgtccagccgcgcgccgccagtgtgtgaccgcgcacatccagaccaacagccacgcggtcgccgtacttcttgatgaccgaggcggtccaatccggattctccaaagcggcggtgccgatgttcactcgggcggcaccggcctcaagggccgcgtccaacgaagcgtcatcgcgcacgccgccggacagttcgatgttcacgcggtcgccgagctcatgaacgatttctcgcagctgatcgcgattgttgcccgtaccgaaagcggcatcaaggtcgaccaggtgaatccattcggcaccggcctcaacccaagtacgggcggcctcgaacggcgaaccgtaatcggtttcggaaccggattcgccttggcgcaggcgcacggccttgccatcgcgtacatcgacggcgggcatcagagtcaacgacataagaagagcctttcttcagttacttatacacaatttgagctccctcgtcagagggagcttcatgcttttttacagcgtggcgatccagttcttgaggagctgggagccagcgtccccggacttttccgggtggaattgcgtgacggacagcgggccgtgttcgtaggcggccacaaagcgcgatcggccgtacgagcaccagctcacgcgttcgggcgaatcgctcagatcgatgtcgaagcgggacgtatccgccggcttcacttccatcgcggcgtaggagtgcacgaagtagaaccgttcgttctccacgccgttgagcagcaccgaatcgggggcggcctcgatcgtgtcccatcccatgtgaggcaccacgtcggcgtccagcaggttcaccgaaccgccgatcagtccgatgcctgcggcatgggcaccgtgctccagaccgtgttcgaacatgatctgctcgcccacgcacacgccgagcaccggacggccagcgcggatgcgatcatagatcacacggtcgccgtcgaccttcttcagtccttccatacatgcggcgaacgcacccacgcccggcacgactaggccgtcggcctccaacgactgccggtagtcggaggtgagggtggtgtcgacgccaagattggcgagcgcacgcaccatggaacgtacattgccgaaaccgtaatcgaaaacaaccgctgtggtcatctgctctcctatcccctactggtttggttggcgtctattcgatgcgggagccgcgcccgccacgtccgcgcctagtgtggttggcgagaatctgcatcgcctgatcatggtcgagtccagcggaatccaccacttcgaacccttgggtcttgagttgattcagggttacgatgccgagcatcaggtcctcgacgaagcgcggcgtggaggtgaacagcacgggcggcgcgaaactctggccggcctctccctgcacgtacatggccacttcaagcttgtcggcacggttgactgcaagaatcacggccatgccggataccacggtggtcaggtccttggctgcggcttccgggccgtcgccgttcagattcttcagcaccgcgacggccccctgattggcaccgatgcatgcggcggagatgtccgacagctgacagaacgcggccaacagttcggcggaggcaagacgggtaacgatcagcgccaccttcgccttgttacccaacagtccagcgagttcgttgtcgaagccgagcgaggggtcgaccacgtcggccatggcctcgttcaccgcatccgcaacggacccggtgacgtcgtcggtcataggctggccggaatcagcggaagccttatcagccgtatcatcattcgcgtcggaatcggacttcgctgaagcagcgtccgctgttttatcggcatcactggtatcactggcatcgccggataccgaatcgtccgcgaattctttctcgaatccggcgagcgcagcctcaagctcctcgtcggagaagtgcgattcgtccggatcgaacttgtcgtcggtcatcacagggctcccttggtgctgggcacgccgtctacacgcgggtcgatttccacggcgaagcgcagcgcacgggccagcgccttgaattcggcttcagcgatgtggtgcgggtcgcggccggcgagcacctgcatgtgcaggcagatgccggcgtggaaggcgatggattccatgacgtggcggaccagcgagccggtgaaatggccgccgatcatgcagaattcgtagccttcgggctcgccgctgcacacgcagtacgggcggccggaaatgtcgaccacggccttggccagcgcctcgtcgagcggcacggtggcgtcggcgaagcggcggatgcctttcttgtcgccgagagcctgcttcagagcttcgccgaacacgatggccgtatcttccacagtgtggtgcacgtcgatgtcggtgtcaccgtgggcgtggatggtcaggtcgatcagcgaatgcttgccgagcgcggtcatcatatggttgtagaacggcacggatgtatcgatatcggttttgccggtgccgtcgaggttcagttcgaggtcgatgtgtgattcgctggtttcgcggacgatgtgcgcggttcttgccatcatgtctcctgtgtgattcgtcatattggattgcggcgggactcgaatcgcttcgggtctcgccgcaatcggaaagaaacgtcccttatgctgcttccactatacgaagcacttcaacaagggcgttacggaaggtttccatctcctcgtcggtgcccatgcacacgcgcagccaaccgtccggtccgaccacgcggatgagtacgccgcgcttcaggagctcgtcgaagatggcttcacgcttgtcgaagtgcccgccgaacagcaggaagttcgagccggattcggccacttcaagcggctggtccttgtaggtctgttccttgagccatgcggcggtggcctcgcgggtttcgcgcaggtgctcgacacggctcagctgctcgtcggtgtgttcgaaggcggccagtgcggcggcctgagtcacggcggacaggtggtacggcatacgtacgatacgcacgcagtcgatgatgcccttggacgcggccaggtagccgactcgcgcaccggcgaaggcgaaggccttgctcatggtgcggctgacggccaagttcgggtggtccttgatcaggctcacggcgctcggggtgccgggcttgcggaattccacgtacgcttcgtcgatgacgagaatcgggtgcacgccctcgcccgcgccgaccacttcagcggtttcgcaggcggcgagaatacgttcgatatcctccatcggcaacggggtgccggtcgggttgtttgggctagtgagcagcaccatcgagggcttgacctcggcgatggcctcaagcaccttgtcgacgttcagcgtgaagtcggcgttgcggtgggcgagcttccaaccggtgaaggtgtcgcgggcgtactccgggtacatggagtacgtcgggtcggcaccgagtgcggtgcggcccgggccaccgaaagcctggaacagctggagcatgatctcgttggagccgttggcaccccacagctcgtccacgtccagacgggtaccggattcgcgggccaggtaatcggagaatgcctgacgcaattcgatgtgctcacggtccgggtatcggttgagtgtgggggcgatttcacgcacacgcttggcgatggtgtcgcatacggccgggtccggcgcatacgggttctcgttgacgttcaggcacaccggcacgtccagctggggagcgccgtacggctcctcaccgatcaggtcgttgcgcagcggcaggtttgcaggaatcgagctcatcgcagaccggcttccttctcctgctcgcgcagggtggccttgtcatacggatccttgacgaagcgggagagcacgcactcgccgtgggcgggcaggtcctcggataccgcgaaggcgttgatgcgggcggcgagggccttgaggccttcctcgtcgtattcgatgacttcgaccggcttcatgaaggtgtgcacgccgaggcctgcggcgaagcgggcggtgccgccggtgggcagcacgtggttggagccggacatgtagtcgcccagcggcaccggggagtacggaccgcggaagatggcaccggcgttcttgatgcgcttgacgaccgcatcggcatccttggtctgaatctcaaggtgttcggcggcgtaggcgttggccgcgtcgatggactggtcgagaccgtcggtcagcacgatggcagactgggtgccggacagcgacgtgtggacacgctcggcgtgctcggtacgcggcacgcggtacttgaggctctcctgcaccttgtcggcaatctcggtggagtcggtgaacagcacggaaccggcgagctcatcgtgctcggcctggccgatgaggtcggcggccagcaggctcgggttggcggtttcgtcggcgatgatgccgatttcggtggggccggcaaccgcgtcaatgcccacgaatgcggagaccagcgacttggcggtggcaacgaagatgttgcccgggccggtgatcttgtcaaccggatcgcacaggatgtcgccgtcctgcggctcgctgcccttggcgccgtatgcgaacatggcaatggcctgagcgccgccgaccgcgtatacctcgtcaacaccgaggatggcgcaggtggcgaggatggtcttgttcggcaggccttcctcattgtcgcgggcgggcggggtggcgatggccagcgattcgacgccggcggcctgggccggcacagcgttcatgatgacggagctcgggtagacggccttgccgccgggcacatacaggccgacgcgctgaatcggaatccagcgttcggccacgcgggcgccttcggcgaggtcggtgtagaagtccttcggcacctggttggcggccacggcgcgggcgcggcgcaccgattcctcgatggcggcgcgcacttcggggtcgagcgtggtcagggcgtccttgatcgcctcgaccggcacgcgcaggttcttgggacgcacgtgatcgaacttctcctcgaagtcgcgcagggcagcggcgccgcgttctttgacatcgtccagaatcggacgcaccaaatcggtggcttcggaagtacccattgcagcacgcggcatcgcggcaagcagttcggcacgggacaggttctgaccacgcaggtcaatgattcgcatgatgttctcactcataacgccccatcgtagcaatgtgcgaggcctaagcggcgaggaacgcccatgttcacccgtatcgtgagattatcgtgcgtgatgtgggttcgtgatacaggttattgacgcacgccaaatgcccgagcggtctcatcgataatcggcatgtcatgcacggcgacgtgactcacttcggaccatcgcgggccaatggctaattgctcaaccaaggcttgcactgcgtcgctgctgccttgtgcttccagctcaaccgagccatcgcgacaattacgcacccaaccccgtacaccaagccgacgtgcctgagtcaccgtaaaataacggaatcccacgccttgcaccagtccgttgaccactatatgtttgcggaccaaattcgccgattgcctcatgatgctcagttcctaatccatcgttcgcagcattgggtagaggctcaggaatcgccggtatgcgtcggcatatgtgcgtgcggtgtcaggattcggctggtatacagtgcattcgcatactgattgcagcaggtctggtacattgaataccaacgaggccattgccactgctggcagaatatcggcattggcgaacacttcgatgggatgctccaacacatcggccagaatctggcaccacgcattttctctggctccgccgccaatcagggaaatctcgattcacgaatccttcttccacaccaaatgccagattcgcagcaccgggcttgccggtgaacggttcgggcgaaacggtggcgatccagcctgaggtgccgatattgatgttgtattgaccagggtggctgacaccgctggcaagtgtggtggcacccgcgtctccaatgcccgcgtataccgcagttccggcggaaaaaccggtgcgttgtgcagcggattccgtcactgtgccaatgttgtcttgcggattgtgcaggtgtggcaatatggtcatgtcgatttctgcgacctcgcataattcggcatcccactggccattacggatattcatggccccagctgtggaacacgccgccacatcgcccacgcattcgccagttaattgggcgatcaagtagtccttggaactgatcaatacatgacgaatgcgcgcgtacgtttccggctcgtgttcacgcagccacatcaacttgggcaacggcaagcagccttcgagccggttaccaacggtgttcaggaaacgttctgcaccgccctgatatgtctcggcgagttgcttggcctgttcctcggctcggccatccgaatacagaatggcattgcggacgggattgagctcgccgttcaaaacaataacatcctgcatctgaccgctgaaaatgatgccacgaatgcgagtcacattgaattctgactcggattgccgcgcctgctcaatcatgtgcctggaggccgagcagaaagcttgccaccattgatcggggctctgctcccgatagtcgccgttgataataaggtcaagttcgctactcgcactagctacaatgcaaccctgcccattaactaaggcacccttcaacgccgtggtccccgcatcaaatgcagccacatattccgtagtcatatcgttcatcgtagcgctgaaaaaaagaatcattctttgccagcaaaacgcggcttattgcatcgtcttgtttctagaatgggaaattgaacgaatactacgactagtgaggcattatggcaattcaatcgacaatcatgctgaacaacggcactgtcatcccgcaggtgggcttgggcgtattccagacaccggatggtgatactacagtgaacgcggtgcagacggctctggagaatggctaccgccatatcgataccgcaatgatttaccacaacgaggcttcagtgggtgaaggtattcgccgtgctggtgtgccgcgcagcgatttcttcttgaccaccaagctgtggaatgacgatattcgcgcacgccgcggcaaggatgcattccaagaaagcctcgaccgcttgggcgtggattatgtggatctgtatctgattcactggccagcagacggctggcagcaggcatgggacgacttgcaggagatttatgcctctggccgtgccaaggccattggcgtcagcaacttccaaaagcatcatatcgatgagctactgacccatagcgatgtggtgcctgctgtagaccaggttgagtcttccccacaattcaccaatcaagagcttattggccagctgcgtgccaagggcattcacactgaagcttggagtccgctcggcggcaccggcggtaacctactcagcaacccagtactggccggaatcggtgccaagtacggcaggtctgctgcacaggtagtgattcgttggcacatccagcgcggcatcgtcgtgcttcccaagtccactcatgccgagcgcatcaagcagaacttcgaggtcttcgacttcaacctatcggtcgatgatatgaccgccatctccgccatcaacaccggcaagcgcaacggtgctgatccggacaatttcaatttctagacctttatcggtccagatacgcaaagagggaactctccgtcattggagggttccctcttctatatgctttcgattcggccacaccctaggtgcgagagcctatgtcttgtcggtgtcttgtcttgttggtttcgggtatgcgaaagccccttggggcgtgtgctccaaggggcttcctgtacgtgtggtgcggcggcgtgctactctcccacaccctgtcgggtgcagtaccatcgccgtgccaggccttagcttccgggttcggaatgggaccgggcgtctcacctgggccatggccgccgcaaatcttctcttatacggtcagacgctggggtctgccggcctgtggcggcctgggaaccggacagcggacgcggatatgccgatgtttcgtcttgtggccagacaatgctcattgccgtctggtgtcgtttgcaggaggaagatgcggtccaaccgccaggggttggaatgttggtgttgcctttcgtccgttagtaccggtcggctccacccctcgcggggcttccacgtccggcctatcgaccacgtgttctgcatggggactacaggaactcgaaggttccacggaatgcttatcttggagcaggcttcccgcttagatgctttcagcggttatcccttccgaacgtagccaaccggccgtgccactggcgtgacaaccggcataccagaggttcgtccacccaggtcctctcgtactatgggcaggcctcctcagcattccaacgagcgcagaggatagagaccaaactgtctcacgacgttctgaacccagctcgcgtgccgctttaatcggcgaacagccgaacccttgggacctgctccagccccaggatgcgacgagccgacatcgaggtgccaaaccatcccgtcgatatggactcttgggaatgatcagcctgttatccccggggtaccttttatccgttgagcgatgccgcgtccgtacaccggcaccggatcactagtcccgactttcgtccctgctcggaccgtcgtcctcgcagtcaagcccgcttgtgcacttgcactcgccacccgattgccaaccgggctgagcggacctttgggcgcctccgttactctttgggaggcaaccgccccagttaaactacccgccaggcactgtccctgaacaggatgactgttcgaggttagacatccaatgcgaacagagcggtatttcaccttacggctccgcgcgatctggcgaccgcgcctctcggcctcccgcctatgctacacaatccacaccgaatgccaataccaaggtatagtaaaggtcccggggtcttttcgtccttctgcgcttaacgagcatctttactcgtactgcaatttcgccgagctcctggtcgagacagtggggaagtcgttacgccattcgtgcaggtcggaacttacccgacaaggaatttcgctaccttaggatggttatagttaccaccgccgtttaccggggcttgaattcaccgcttcacccgaaggctgacggatcctcttaaccttccggcaccgggcaggcgtcagtgcatatacagcggcttgcgccttcgcatgcacctgtgtttttggtaaacagtcgctaccccctggtctgtgccacccccaaaagctcccacagcaagtgtgttcaccatcgggggtctcccttaaaccgaaggaacgggagtgatttgccgagttccttgaccaggattcgctcgatcgctttggtattctctacctgaccaccagtgtcggtttggggtacgggcggctttgagcctgacgccgaagcttttctcggcagccgggatcaccggatatcgggccataaggcccccatcatcgcacctcggacccatgcgggacggatttgcctgtcccacgccctgcgtgcttgaccacggaagaccacctccgcggccggctacccttctgcgtcactcctgcgctgacctactacaaggatcggtcccaacaggccagggcatcccgcccccgaaggagcagtaagcccggacccggaggttagtactccaagcctcggttttggcggctgaaagccggtacgggaatatcgacccgttcatccattcgactacgcctgtcggcctcgccttaggacccgactcacccagggacgatgaacgtggccctggaacccttggtcatccagcggacgggatcttcacccgtctctcgctactcatgtctgcattctcactcccatgaagtccacggcgcgttcacacggccgcttcgcccctcatgggacgctctcctacccagtacaaaatactgccgcgtcttcggtggtgtgcttgagccccgctacattgtcggcgcggaaccactagaccagtgagctgttacgcactctttcaagggtggctgcttctgagccaacctcctggctgtctatgcgactccacatcctttcccacttagcacacgcttcgggaccttagacgacggtctgggctgtttccctttcgacgacgaagcttatcccccgccgactcactgccgggatacgcgtcaccggtattcggagtttggttgctgttggtacccgatacgggcccgcaagcatccagtagctctacccccgggacgtaatgacccgacgctgcacccaaatgcatttcggagagaaccagctatcacggaatttgattggcctttcacccctagccccaagtcatccccccggttttcaacccaggtgggttcggtcctccacgcggtcttacccgcgcttcaacctgctcagggctagatcatcccgcttcgggtccaggacacgcgactcaaacgccttttaagactcgccttcgctacgcataccccacacgggttatgctcgccacatgccactgactcgcagactcatttttcgataggcacgccgtcaccccacaaaagggctccgacggattgtaggcgcacggtttcagagactgtttcactcccctcccggggtacttttcacctttccctcacggtactcgttcgctatcggtcagacaggaatattcaggcttacccaacggtctgggcggattcgcacggggttccacgggacccgtgctacttgggagacgcgatcggcagaccatgcgcgttcaggtacggggccctcaccctctgcggcccggtattcaacccggttcccctgacacatggttttctgcaactgccggccggcccgtcggagccggcgcacgcgatcccgcaacaccccgcgcgcaacccccgacgggtatcacacgcgcaaggtttggccatcatccgctttcgctcgccactactcacggaatatcctttcctgcaggtactgagatgtttcacttccctgcgtaccccccggccgaagccggtaccgacccatgacggtcggtgggttcccccattcggaaatcctcggatcaaagccctgttggcggctccccgaggcatatcgcagcctcaaacgtccttcatcggtcctgtctgccaaggcatccaccatacgcccttgcaagcaacacacaccacgaaagtgcatggccgcaagattcctctagcaaattcccagacgacaaatcatcacactaaaaatgatcacaaaacgatcgaaacgaacaatagagttcgattcgaaatcaacagcaaaacaaagattcaaaaacccttgttttgctcgcgtccactatccagttctcaagccaccacgcaccgccacgccatcgcgccggcacacggccggcccccaggcacgacgggcatcgaatcgcgccagggcaaaagcctggggtggcgatccgggagcccaaaagcgcatccgcaccaccccgcacccaccgcacgaccggcagggcaaagccaacgacgtcttccacaccagcaaccccgccgccatcgcaccatgcgacgcgcggggcacacaccgtcggacgaacatccgactgaattctccgtagaaaggaggtgatccagccgcaccttccggtacggctaccttgttacgacttagtcccaatcacgagcctcaccttagacggctccatcccacaaggggttaggccaccggcttcgggtgctgcccactttcatgacttgacgggcggtgtgtacaaggcccgggaacgcattcaccgcgacgttgctgattcgcgattactagcgactccgccttcacgcagtcgagttgcagactgcgatccgaactgagaccggttttcagggatccgctccgcgtcgccgcgtcgcatcccgttgtaccggccattgtagcatgcgtgaagccctggacgtaaggggcatgatgatctgacgtcatccccaccttcctccgagttaaccccggcggtcccccgtgagttcccggcataatccgctggcaacacggggcgagggttgcgctcgttgcgggacttaacccaacatctcacgacacgagctgacgacgaccatgcaccacctgtgaacccgccccgaagggaagccgtatctctacgaccgtcgggaacatgtcaagcccaggtaaggttcttcgcgttgcatcgaattaatccgcatgctccgccgcttgtgcgggcccccgtcaatttctttgagttttagccttgcggccgtactccccaggcgggatgcttaacgcgttagctccgacacggaacccgtggaacgggccccacatccagcatccaccgtttacggcgtggactaccagggtatctaatcctgttcgctccccacgctttcgctcctcagcgtcagtaacggcccagagacctgccttcgccattggtgttcttcccgatatctacacattccaccgttacaccgggaattccagtctcccctaccgcactcaagcccgcccgtacccggcgcggatccaccgttaagcgatggactttcacaccggacgcgacgaaccgcctacgagccctttacgcccaataattccggataacgcttgcaccctacgtattaccgcggctgctggcacgtagttagccggtgcttattcaacgggtaaactcactctcgcttgctccccgataaaagaggtttacaacccgaaggcctccatccctcacgcggcgtcgctgcatcaggcttgcgcccattgtgcaatattccccactgctgcctcccgtaggagtctgggccgtatctcagtcccaatgtggccggtcgccctctcaggccggctacccgtcgaagccacggtgggccgttaccccgccgtcaagctgataggacgcgaccccatcccataccgcgaaagctttcccagaagaccatgcgatcaactggagcatccggcattaccacccgtttccaggagctattccggtgtatggggcaggtcggtcacgcattactcacccgttcgccactctcaccaccaagcaaagcctgatggatcccgttcgacttgcatgtgttaagcacgccgccagcgttcatcctgagccagaatcgaaccctccacaaaaaaaacttcatgaaaagcatccgaatagatgactctcaaaacaaaaattgacgagcacgtccttgaggaaggacgccctcaaaaaacctcacccctcatcaaaccctcccgggtacccgaccaccacgacaggcaatcaggcgaggaatgaactggcaatcattgactataaagaagtagtacaaacacgctcttgagttctcaaaccaccaccactcacccacctcgcagctccccggaggagaaccactcgctgagcggcagcaaggagataacttacacgcattcgcggactcgcgcaaatcaggcatgaaaaaacacgccagaatcgttgaaacgacaggcttcgcccggcgtgtcgaaatcagcttgaatcacgccgttaccatcaggatacgccggctttttatgggctcacgtaacgaaatcagatgttcaccggcgtgtcgcaacaatttattccacgttcaactcccctcagtccgatcacgcggacggttcacccgcaaaaagctctcgtccttatggctcgactatcgtctcgccttcgtctaaaaaaacagtccaccggactgttttttagacgcctcagcatcaaagaggggaaccaaagggggattagaaggtcaggcgcatctgatgccagaccacgtcaccgtgagtggactccgaaatgccctcgtcctcatacccaaattgcgcatagaatccgaccagccgatctttgcaggtgagcaccaggcctttacgtccagctgcacgagtgtcttcaatgactttcctcatgagtgtactggcgcaaccgcgatgctgatacttcggcgcagtatccacgccgaaaatcatttgccagtcaccttgagggttgtgctgcgcggcatcctcgtacatgtcatcggtcaagtcgcgccgatcggtcacaaaaccgttgatgaacgccatgacgatctcgccatcaatcaatagccagaaacattccggataggtctcgattcgggcgcgcagggacgagcggtcggcggcctcggcggccgggaagcattcgaattccatggcggccagcgcgtccagatcgtcgatggtggcgtggcggattaactggggatcagaatcagtcatgtttttgtctttctcttaacactccgttgtgagcaactcccccagtcacgcttcgcgtgctggctcccctcaccttgaggggagccagatggatgtcagattacgcggtattcgcgtaacagggtggcaatatcggtgccgtcgagtttcttgagcaccttcttgaccacggccttttcaatgaagttgagcttcatatcggtgaccggtgcaccgtcacgcaatttgacggtggcgttgagcaggttgcgcacgtcatagacgctaccccacacttcaggcacgccgcggtccacgccgagcaacgtgtagacagcttccataccggtgcgcatcgagtattcggtggtgaaaatcgtgtcgcgcggggtctcggcgaactggccaaggaatgcgaagttcacggcaccatcgggcaccacgtccgggcggtcgccggccgcgcgcggcatgaagaacgcggtgatgtacggcatcatgaccggcacggtgttggcgtggtgctttgcgagcgcctcgatcttgtcggtcggcacgcccatgtggtaaagccactcctcgcaaatctcttcaccggtgcattcggtcatcggcttcttcacatagttgccgggcttgtccgggaacaggccgtagacccatacgcacagctggtccttgggctggtcgcggaactgctgctggcggttcagggtccaactcatgagccagttggagtcctgcacggtgacgatgccgccggtgacgaccttgccggagaacgggtcgcgcttgcagatcttctggatgtacggcggaatctcgccgtccagggtggtgacggtggcgctcatccacttggtggcattcggatcggagcagaacttctccggatggccaaagctcgggtcctggtcagcgatacgcttccacatatcccagccgccaccgggcttcaggtctgggttccatgcggcgggcgagttctgggaacccatggtggagttctccacgcaaccgccgttggtgatgaacaccagatcgttctcggtcaggtcgatggaggatttatcaccctcgtggtccacgtcgatgcgcacggcaagcttcttggtgggcgtgctggcagggttgcgcttgaagaagccggaggtggcctgaatcttctggatggtgtcttggcctacgccggtgtgctcgcgcttggggccggctcccccgccaatcgcgaattccacgttctcgaccttggtgttgtagcggaattcgacgccgtgcgattccagatacttgaccatcggcagaatcatcgactcgtactggttgtagcgggtgaaacgcagcgcggaaaagtccggcaggcctccgatgtgatgaatgtagcgcttgatgtacagcttcatttccagcgcggagtgccagttttcgaaggcgaacatggtgcgccagtacagccagaagttggagttcagcacctcatcatcgaagaaatcggtgatcggcttgtcatacaggtcttcgtccggggtgaagaacagcttcatgatttccatcgaagccttgtcggacagcccgaacttgcccttgagccccgcgtccttgccgagattcttggtggcgcggcacagcgagtagttcgggtcctccttgttgagccagtagtactcgtcgagtacgctgacgccttcggtttcgatggagggaatcgagcggaacagatcccacatgacctcgaaatgattgtccatttcgcggccgccacgcatcacatagccaaggccgggaatatcaagaccgtcacaggcgccgccgggtaccgggtccttctcaaggatgtggatgttctcgccaggcatctgaccatcacgcaccagataacaggctgcagacaatgccgccagtccggtaccgatgatgtatgcatgcttgttgtccacgtcggccggcttcttcggacgtgcgaaagcctcataattgccgctgctgtagtacatattccgcctccttggggcagagttgacacttcatcaactcttcttgaatagacatcatgtcgcattattgacgaacgcgctataggcaacgttcggcgttctgccgcattcgccaataccttgcatctacggttttcgaggcctatgttggctgttggcccataactattgaaggcatacaggcatactgaggatgcggggtgcttcaccgaaccggatgattgataaggtcccgttcaatccacgccatgaccaaatcggcaagtcggtttacctccgcttcggcgagttcacggcctttgggcagatgatgccatttttcgatgcatccgcggcagcatgtggcggtagcatgctgagcggtgaataccggatggccgcgccatggcgtctgtctgccgtcgttcttcggttcggctgcgcctatgcggtctcgcaacatttctcgcgcatgacgatcgatggtcgccttgcctttggtgcgggcataggctcggtctttgtcggtcaaagcgaatttggcgcggaactgcgaatgagacagccgttccagcatcgtggcaatccattgttgctcgtcatcgttgttaccagtatccgctatctccatgcccatacgttccacagtagtcgcgcacatcgtatggtggcacacgccttagctccctctgatgaaggagcccccagcaaagccaggtgagggagaggccaggggcgaaacccgccaatcaggcggcaggcaagcagctggggccaaacagaatcttgatctcagcaaacaacgaagtatctcgcttgacgcggaaacgatcgccaaacgtgagcacctgagcgttacccttctcatccagcaccgcaagatgtacttcgcagtaaccaggatgattagcgagcacctgaccgagttgcatcatgcgttggcgctccaacgccaccgacggcagcgtgatgaccaacggacgttcatcctcggcttccaaggtcggaatctgcatttccgtggctctcagagaaacggtttcgtcgcgcaactccacttggccacgaatctgtacgatggcgtccacggcaagttcagcggcggccgcttcatagaccttgccgaagaacatgcattggatggagctttccatgtcttcgatggtcacgatggcccaggggttgcccttcttggatacgcgccggtccacattggtgaccaaaccagccaacgtgacctgctgtccttcacccatcgttttggctcgatcaaccagatgcgcgatggacatttcacgcaaggacgcgagaatcgactgcataccggagagcggatggtcagacacatacaggcccaacatttcgcgttcgaagttaagtttggtcttcttgtcccattcctcaagatcgggtacggtcacggaagcgtcgcccatggcctccgctcccccatcctcggcatcggagaacaaatcgaactggccctccgcctgtttgcgcttcagactcaccaccgaatcgatggcggcctcgtgcacggtgagcagcgcgcgacggttcgggtcaatcgagtcgaaggcaccggccttgatcaacgattcgaccaatcgccggttcagcgcggtcaggggcacgcggcggatgaagtccatgaagttcacgaacttgccgcgcgggccttcgcgttcggcgatgatatcggccacggccttgtcacccacgttacggatggcaccaagaccgaatcggacgacgtcgccgactgccgagtactcgtacaccgattcgttgacgtccggcgagagcacctggatgcccatgcggcgggcctcgcccaagtacagtgcggtcttgtctttgttggtggcggcaccttgcaacagggcggccatgaattcgaccgggtagtgcgtcttcagatatgcggtccagtaggagatcagaccgtatgcggcggagtgcgctttgttgaaagcgtagccggagaacggcaccagaatatcccacacggcctgggaggcctcttcggaatatccgtgctccttcataccggcgaagaacggcaccttctccttggccagcacttcgggcttcttcttacccatggctcgacgcagcacgtctgccttgcccagtgaataaccggcgaggattcgggcggcggactgcacctgctcctggtagatgatcagaccataggtctcgtcaagcacctgcttcagaggttcctcaagctcagggtggattggcgtgatcttctgcaggccattcttgcgcttggcatagttggtgtgcgaatccatactcatcgggcccggtcggtacagggcgataagtgcggaaatatcgttgaagttatcgggcttcagggttttcagcagtgaacgcatgccgtcggaatcgagctggaacacgccgagcgtgtctcctcgggacatgagtttgtaggtttcggcgtcatcgagcggaatcttggtgtagtcgatggcgggtttgccgttggcctcgatgttcttcagggtgtcgtggatgatcgtcaagttggacaggccaaggaagtccatcttgaccagccccaacgtttcgcacgtgtggtattcgaaggtggtggtgatggtgccatcggtgcgttccagcaacggcgaggtgtcggtgatgggtgcgctacccatgatggtggcgcaggcatgtacaccggtctgtcggatcaggccttcgatacccttggcttcttcggtgatgcgcttggtgtccgggtcggaatcgtagagttctcggaattccctggcctcggcgtagcgtttggctgtcgggtcgaagatgtcatgcagactgatgtctttgccgccggtggccgccggaggcagcgccttggtgattttttcaccgactgagaattcataacccatgatgcgggcggagtctttcagggcctgcttggttttgatggtgccatagatcacgcactgggcgaccttatcggtgccgtatttttcgccgcagtattcgatgactcgcgcacgaccttcagggtcgaagtcgacatcgatatcaggaaggctcactcgctcagggttcaggaacctctcgaaaatcaggccatgcttgagcggatcgagctcggtaatgcccatggaataggcgaccatggcgcctgcggccgaaccacggcccggccccaccataatgccgtggtccttggcccactgaatgtagtcggcgaccacgaggaagtatccgcagaactgcatctggcagatcacaccacattcgtagtcggcctgcttcaatacgtcgagcggcgggttgccgtcgtaacgcttctccagaccttcctcgacttttttgaggaacagggaggtctcatcccagccttcgggacaagggaatttcggcatgaacgcgccgtcttcgtggtcgtcgaacatcacgttgcagcgttcggcgataacgagcgtattgtcgcaggcgtccgggtggtccttgaacagttcgcgcatctcttcggcggttttgatgtagtagccggtgccgtcgaacttgaatcggtccggatcgtcaagacgggaaccggagttgatgcagagcatggcgtcctgcgcctgtgcatcttcggcgtgtacgtagtgggaatcgttggtggccagcagtggtgcgttgagtttcttggcgatggtcagcaggtcaccggtcacctgagtttcgatgggcagaccgtgatccataagttcgatgaagaagttgtctttgccgaagatgtcctggaattcgccggcggcacgcagggcctcatcgaattgaccgaggcgcagacgggtctggatgatgcccgaggggcagccggaggatgcgatcacgcctttggaataggtggcgagcacctccttatccatacgcggataacgcatgacgcgaccttcgaggttggccacggacgaggctttgatgaggttgaccaagccttcgtcgttttcggcccacatggtcaagtgggtgataagaccaccaccggagacgtcgtcgcggcgctgggcttcggtaccccaatgcacgcgggacttgtcttgacgtgcggtttccggggtcacataagcttcgatgccgatgatgggcttgacgccattggccacgcagttggtgtacatctcgtaggcgccatgcatgttgccatggtcggtgatgccgaccgcaggcatgccaagttcggccgcacgcttggccaaatcaggaatcttcgacgcaccatcgagcagcgaatagtgcgtgtggttatgcagttgcacaaagttgttcccgtaatcagccatgcgccccaccataccgtgtggtctgggcggctgttcagcattcccgtcggcactccgcgatgagggcggcgcacagcatgatgacctgggcgacgagattgaaccacaccagcgcgccgatcaacgccgcgaacggtgcgagcagcggattgcgggaggcgccggtcagcagtcgcgcgccgagcagctgcatcaccgaaaccgtcagggaacccgacgacgcgccgatcagcgtgaatcgtccggctttgatgtgcgcgaccacacgcaacagcagcatgaacaaggcgaagttcagcgcgacgccggtgcagaaaccggtcagctccagcagcagaatccccggcagcgagctgctggcgatgccgctccactgcaacacgcgccgcaccatgccaccggacaccgtaccggccgcggtcgaaagaatgaacagtattgcgatggcgatggcggcaagcgtatcgcgtaaccttgcgacgacgatattgagctcgtcgccgcagtcgtcgaacatggaccgtacggcgtggcgcagcgagttcatccagccggtcaccgtccaccagaacatggccaacgtggccagaccggtccatgtcaatgtgcttgacatggtgtttagtgcggaagacgtcagaaacgagtcggccacaccgggaatgacttcacgcaccgcgtcgatcagcatctgctgccaatcaatgttgccgaccatgataaggccgaacacgctcaccgcaatccagatgccggcaaaaaaggcgaatagcagaccatatgccagaccattcgccagcagggggccgttccgcgacacataccggtcgagcacgcgccccggcagcgaacgtgcccacgcgtacgctcccctgtcaatcgcactcttcaacccatgcatagttcaactgtagctgttgttaccattgtcccgaattcaatttgtaagtgcaacgctcgtcgggggggggtgacgttttgttggacttcgttgtctgtatggtcgttcgcaacgatagcacgcgcgttcaggcgacgagcccgagtccgatgcgtttgtccatgatgctcatgccgtattcgagtttgatgcgcttgtccctgtaccagaccatgcactcgtccaacaacgtgacgaactcgtcgatcgagacaccttggaagcttcgcttgtggaagaactcctgcttgcctgccgaagcccccggcggctgcgttgtccggactgcggcccttcgcgcccatcgaccgcgtcaggccgtggctcccgcagacgcggatccattatgcacatctcggtaggaacaaaacaacgtcaatgaagaaacctgaagaatcgctggttgtcctgtcatctttagatgacaggacaaccagcgacaagagtaatcgcctcccgttgtctaaatgaaagtgcaacacccgttagattggagattgtccagataaccagtccgaagggatgtcgcacctatgggagaagtgtattcgcacctgtcggaagaggaacgccaggtcatccagatcgaggtaggcaacggcgccagcatacgcgggatcggcgcgatgctgggccgcagcccgtccagcatcagccgggagatcaagcgcaacacatggttcccgtccaacgagaacgagtcgtaccgcccgtaccggccgaaaagactgaaggcggggccatggaccggccgctactacatcgccgggcccgcgcagcgcaaggccgaccgcaggagatccaagccacgaaagccctaccggctgtcgcacgaccgcctgtgggcgcaggtggccgaatggctgggccgcggctggtctgtttttgttcaataggaagttgaggtttgggggtggtgccgttttcttggactgtgatccgaggaggagacggccatggcgaagtacacgagggaacagcggcaacgcgcggtcgagttgtatgtgaaatacgagggctgcgcggcggacgtgatccgcgagctggggtatcccagccgggaggcgttgcgcatgtggcaccgggaccggcccgacgaacaggagacgggcgtgtcctcgcagcgtggtgaacggtatgcgcgctacacggaggagcagaagcgtgcggccgtggaccattatctgacgcatgggcggcgtgcgagccgcacgatgcgtcagatggggtatccgagcaaagaggcgcttgcctcgtggatcgacgagctcgcgccgggcgaacgccggattcgccgtggcccggttcccggggaattgaaacgggatgcggtcctgaaggtcgcgtccggcgaattgagttcgcgcgaggccgcggaggcggtgggtgtggattcgtcggtcgtgcgaaaccggaagcgtcaactgctcggagacgcgaaaggactcatggtggcgaagagggaaccggaacgcggggattcctcgcagcaggacgatccggacgcgctgcgcggcgagatcgccacgttgcgcgccgacctcgagcgtctgcgcgccgaacagcgggccatggagatccggttggcgatcatgaagggtgcggcggaactggtgggaaaagagccgggcgcagacccggacaacctgacaagccgagagaagacgaccctgatcaaggacatcagtgagacgttgggcgtgagcgcggagagcctgctgaaggaggtcggcatcgcgcgcagcacgtactactaccagttgaaggccatgcgccggccggacaagaacgcgaacctcctgtccctggtgcgcgaggcgttcgggaacagcaggaggcgttacgggtacaagcgcatccacctcgagctcaaaagcgcgggcatcatcgtgtcggccaagcgcatcatgcgcctgatgaccagccacggcatggtccccgtgctcaagagcgcgaagcgctacagttcgtacaagggcgagatcggcggcgcacccgcgaatctcgtgaaccgcgacttccacgccaccgcgccgaaccggctgtgggtcacggacatcaccgagttcaggatcccggcgggcaaggtgtacctgtcgccggtcatcgactgccatgacggcatgcccgtcgcctggacgatcggcacgagccccaacgccgccctggccaacggcatgcttcgcgacgcgtgcgccacgctcaagcccggcgagacgccgatcatccactcggacaggggttgccattaccggtggccggaatggatccgcatctgcaccgagcacgggctgacccggtcgatgagcgcgaagggctgttcgccggacaatgcggccgcggaggggttcttcggccgtctcaagcaggagttcttccacaagaggagcttccggggcgtgacgatcgacgagttcaccgcgatgctcgacgagtacatggtctggtaccgcgacaagcgcatcaagaccgaatacggcatgagcatcatggacaaacgcatccagctcgggctcgtcgcctgaaaccatccggtacactgaccaacgaccatacagacaacgaagtccaacaaaacgtcaccacccccaacacgaaacaccgacttgactaaaaacactggtcgccgctgcccgtcagcggcaggccgcgcgtcctgtggccggacgatgcgctcatgcgcgtgtgcccggagaccatctaccgatgggtctactccagcaggccgcttcgggaacgctgggcgcggtgcctgccgcgagggcacaggcggcgccgcaggcacggcggcaggaggacgtcgcgcttcccgatccccggccgagtgcccatctccgaacgcccgccggaggccgacggcaggagcgcgttcggccattgggaggccgacagcgtcatcggagtgggatgcaacctgcacaccgaggtggagaggaggaccaggttcctcatggcccgcgtcgttccggacaagaccgccggcgagagcgtcggggcgcagctggacatgttctcgccgctgccggccggcgcgcgcgtcagcgtcacgcacgacaacggcaccgagttcgcccaccacgaaaggctgcgcgacgggctgggcatggccacgtacttcgccgacccgtactccagccggcggcggggaagcaacgagaaccgcaacggcatgatccgccggtatctgcccaaacgctgcgagatacggatggacatggcaaaggaggtcagggagatcgtcgacgagatcaacaaccgccccatgcgcgtgctcggctaccgcacgcccgccgaggcgttcgccgacgaactgttagaattacaggaccaacaagggtgttgcacttctaaatagacatcggggtaggctccgcccgcaagtcacagtggtacaattttcaggtttgagactgtagcaagttgagtcgctttatcagtaagtctgtatttggaggtatcgatggcccatcgtccgcttatcggcgtggtcccgttgtgggacgacacactgaatagcctgtggatgctgcccggctatttcgacggcatcatcgaagccggcggcatcccggtgatgctgccgctgaccgacgacgagactacaatcgaacagctggtcagccaatgcgatgggttcctggtcaccggcggccacgacgtggatccagaacggtatggcgaggcggccggccccaagacggtcaaactatgcaaggcccgcgaccggatggaggagcgcctgatcccctccgtcatcgcggcggacaagccattgctgggcatctgccgcggcatccagagcctcaacgtcgccttgggtggcacgttgtggcaggatctgccggacgaacatcccagcccggtcgtgcatcatggcgacaagccgccgtatgacccggtggtccacgaagtgtcgatcgcgcccgattcgccgttggcccgcgcgttgtggccgctgggagacaacggcccgagtgaggcggaggccgatgaggtcgattccttcggcaggccgtatcatccgcgcgcctatacgctgggcgtcaacagttatcaccatcaggcgattcgcacgctgggccagggactggaaccgatggccactgcgccggacagcatcgtggaggcggtctggatgccggccaagcgtttcgtctgggccgtccaatggcatcctgagttctctcaccgcgccgatagcaaccaacgtcgcatcctcagcgccttcatcgacgcctgctgacgcaagctcccgccaatctcgacgaaacgtcttccaagaaatggcttgcccgcatccgcagccccctaccacgacatgagcgcccttgacaacgtcaccctcggcatgcgcttcacccgtgacagcaaacaggtcaggcagcgcaaggccaaggccatgctctcccggctcggactcggccatgtcgcgggagacaagatcatgaccctctccggcggtgaacagcagcgcgtcgccctcgcacgatgcatattgaagcccggggatttgatccctcgccgacgagcccaccggcgcgctcgaccgcgatctcgcccaacatgtcttcgacgaaatgctccgcctccagcacgaatacggcaagaccctcatcatcgtcacccacgatcttggcatcgccgcacaatgcgacaacaccatcgagctacaggcggtttgacggagatattccggcagctttggtctaccgaagtcacgtgttgcccttcaatctcctcggaaatctaggtggcccatttttcaaagaatgcgatcggacgtaacgccccgtaaggagacctgcaatatgaaacgttgaatcgtcatctaaagatgacgttttcgtagatcttccggaatcgccagtcatctgcgatccggatatggcaccggtccggctcgatcgagcccggacgaccatggagaaaacgaacgatcgaatccgaacgcgggtaaagagcctgcgcgacaccattgataaagccaaatttaagaaaacagatcagtatgcataagttttacatgccttcagcctcgtcaaccggcagcgggccccagaatccagtcacagccaggcagagcgtacaacatactgcgtagtacatggcgcgaatcccaatgaccaccatcgattgatgacggccacgaatactcgtactcagcattactgctttggctcatttctgttcacttcacgctggagtaccgagacacgttgagcggaaataccggtaattcacgtacggttaccgaccattggactgaatggtactcagcatccgcagtcacttggggtatggtcatgacggagagccatcatgaccgatctctcgttattctgggatgaatccggcgaagccggaactgaatctaaatattaaaacgcatgatgcacacgttgcggaattagtccaccagaacttcggcatattcggcaggttcagcgggttcgatatgtcgggcacgcatggcatcgagggcggcagccaagtcggccgggtactgggaccggaccgtggtccagacgcgggtgcggggatgacggaattcgagcttcatggcgtgcagccactgccggtcaagtcccaaggcctcagacagcaccggattggcaccatacatggggtcaccgcacaggggatgcccaatcgaggagaaatgcacgcgaatctgatgagtacgtccggtctccagattcacggataccagagtggcctcatggccgaaacgctccagcacatcccagtgcgtaacggccggtttgccggccggagtcacgcagaagcggaaatcggacactttggcgcgcccgatcggtgcctcaatggttgctttgttctctttaagaccaccctgcacgagcgcatgataggttttctttacctcatgctcggcgaactgccgacgcatctcggtgtacgcaaggtcggacttgcacaccaacatcaagccggaagtgcctacatcaaggcgagaaacaatgccctcacgcccggccgcaccataggaagtgatatgcacgccgcggtcacgcagtgatccgagcacggttggaccggtccagccaaccgaggcatgcgccgccacgcctacaggcttatcgactacaacgacatcatcgtcttcgtagacaacggccatatcagttgcgataggctcaggctcggcctgttcctccgccaaatcaaattcgacggtctcccccgcctgcaatgtgctggaccgcgcaacttcacgtcctaaaacgcgcgcctgcccggagtcaaccagatcggcggctttagatcgtgaaatacccagcattttggccacggctacgtcgaaacgcttacccaccaatgcatcgggagcagggactattcgactcattacttggcgtccgcctccggctcagactgtagggattcgtcggattgctcgatgagatccttgtgtgagaacggctcccccataagaatcagaatcaccagggccacaccggcgactaccagatagatatccgccacattgccaacggaccagccatagttaaggaaatccaccactttgccgtcgaggaagccgtcagcgtacataacacggtcaatcaggttgcccagagcgcctgcaaacgcgaaagaaatcgccaccgaccatttcatggagacagtgcgcaccccagccacagcaagggccacgcaagccacaacggccaacagactgattacccaagtagcgcctgatcccatgcccaaggacgcgcccggattacgcaccaaggtgaaggacagcagtccgggaatcacgcgaatggtctgaccgttggataacgcggccatcgcccaagccttggtgagctgatcgacaatcagcgcagccgcggccacacatgcaaagacggccacgcgggtgcgcagccgtccctgttggttcgtcatacgacctgtacctgcctacgctcagttggtcttggacgaggtctggtcgacgtagttgttcgactcggaaacctgcgatgccagctggccgaggtactcggtgaggcgggcgcggtattcagtctcgaactgcttgaggctctggatgttgccctcgacgaccttggactgagcctgaaggttgtcgcgcacctgctcggcatacgtatcggctgcagagcgggtgttcttgtcgtacgcatcagccgcggaacgagtgttcttgtcatactcggcggcacgctgctgcacttccttctcgtagttgtcagcgtcatcgtgctgagacttggagtagttgtccgcatcctgacgagtcttgacggagtatgcgtcggcctcagaacgggtgttctgggagtaggtctcggcatccgcgtgagtctggtcacggtaagcgtcggcctcggaacgggtacgatccgaataggtgtcggcgtcggaacgagtacgagtggagtagtcgtcggcctcggaacgggtacgctcggagtagttgttggccttggtgaccagatcgttgtacttgttctggctggcctcggtgatttccttggccttgttcttgcccttctccacgtactgatcgtgcagctgcatagccagggtcagcatggcggtggcgcgctcgggctcggtgcccggcatggaagcggcgccagcgatcttctgcagagaaccggtctcggtgctcggctcgaccttagaaacctgagcacgaagctggttttcacgctgcttggcttcttcgagctgacgggacagctcagcgatctgagcggactgctgctgagcggcggaaccctgctgctgagcagcggcgagctgacgggacagctcctcgttggccgcgcggaactgatcacgttcctgctgaatggcggcgatctgctgaccgacagcctcctggtcaccggaggcctgagcagcctgagcggtgagctgatcgatttgagcgttcagctgatcgacctgacccttgagctgctcattctgggaggacagcgcgcggttggattcctcggcttcgctgagcttggcagagacaagctgtgctgcctgatcattgccagcctgagcggcctgctgggcctgagccacagcgttcttcaaaccagcattctccgactcgagttgctgcacctgaccggtaagatcggagatcttcgcattaaggttggtcacgtcaggacccagagactgggtggcctgaccgccggctaccgcctgacgtccaagagcctcgacggtttccgtgacctgatcaaggaagtcatcgacctcgtcgacatcataaccttccttgaatcgaacagtctggaaggtatgctccctaatatccttcggcgtcaacagagccataaatcttgcacctcgctttggggcatcgcccgcacttacgttggtctcaagtcagaatgctatcacgaccccatcgtttcagaacattcgacgtgggtttttatgccagatatatgcctccggcgggtcaaaaacggcctcagaacactatcagaacaacactttccagtaccaccagcgcaaaatacagcacaatgaagctgacatcaagataaatcgaaccgagcggcaatgggcgaatatagcgacgtagccagcgcagagggggttcggtaatggaatacacaatattgatcagctgggccaccacaccacgtggataccagtttcgtgcgagaacggagacccagtccagaatcatgcgcacgaacagaaccgtgatatacgcgttgatgagccatgcaagaatgcggccgatcagagagaacactaaggaaagcatgctgacagactaacaaccgcgcatgaaaagtttgctcggagcacaataagaatcggccgactccttgctgggagtcggccgaataccgatataacgtcgaatgcgaaaactactgaaccggtcagtcagcgaacaaatcgtgtgccgaggctggttttgtcggctcttcgaccttgatgttcacctgcgccgggctcaacaggaacacgcgcggagtgacacgctcgagggaaccacgcacgccgaacaccacgccggcggagaagtccacgatgcgatatgccacggcttcggccacaccggtgagattcagtacgaccggaacaccgtcacgcaatgcgcggccgaccagttgagcatcctcatatgacttcggatggatggtggtgattctgttcacacggccaccggggaacggcttggtagtcgacgatgcggcaggcgcggtggttgacgccagcggcgtgaccgtatggtcggaatcaaatgcggacttcgaagccggcttctgctcctcgtcctcctcgatgtagtcgtcctcatcgtccacaacgtcactcatgcccagataggacatcgcgtttttcatgaacccagccatggatcaatcctttcagcgcaggaagtcagggatgtcgagatcgccagccggatcgttcacggcgatattcggatgagcggaagtcggatcatcaaaaggcaacgatgcggagtcaccggtagccggtgtgaatgccggttgggcagtggcagcgggctgtgcagccggtgccggtgctggagctggctgtgccacgggagtcgcaggatcggcggcggttggcacaaccggcgtcaccgtgctctgagtgtcgtcatcttgagcggcgacggggtcaaaaccagcagcaataacagtgacacgcacttcatcgccataagcatcgtccagagcaagaccccaaataatctgggcttcagggtgaatggccttgcgcaccagttcggtggcagcagaggcctcctgcaacttcaggtcggtcggaccggcgatgttgatcagcgcaccgtgtgcgccttcgatgctttcctcaagcagcggagagctgatggcgatttcggcggcctgcgtggcacgatcctctccccgtgcggaaccgataccaaacagcgcagtaccagcaccacgaagaatggagttcacatcgttgaagtcgacgtgaatataggagttcatcgaaatcaggtcagtgatgccctgaacaccggcaagcagtgcggtatcagcggtcttgaaggcctcaatgatgccgatggaacggtcggaaagctcgagcaggcgatcgttcggaatgacgatcagcgcgtcgacttccttgcgcaggttgtcgatgccgtattcggcggaagcggaacgctgagggccttcgaagctgaacggacgagtaacaaccgcgatggtgagagcaccctgttgatgagccgcacgagcgacgatcgggctggcgccagtaccggtgccaccgccctcgccgcaggtgacgaacaccatgtcggcacccctaagcgcctcttcgatatccgactggtggtcctgggccgccttggctccacgctccgggtcggcaccagcaccgagaccacgactggacttatcggaaagggaaatcttgacatccgcatcagagcgcagaagatccttcgcatcggtatttaccgccacaaattcaacattctgtaatccctcggcaatcatgcgattgacggcattaccgccggcaccgccgacgccaacaaccttgatgttggtcttgtcgttgaactcattctgcgcgatctcgctcacgtttggctcctgtcacttcacggttacacccaagagtagcgcaaacaggctactcttggagggaaattcacgcgcagaatggcgcgtgttgcgtgtattttcagtattttctcagtaactggcgtccattgggtcgtcaccgaagagcgcctcacgctcttcgtgggtggtggtacgcgattccaaccagccatacggcaagtgcaccttcttggcgaaacgcacgcggccgcgcggtttgtcgaccacgcgtggcgggtattcgatagtcgggtcgagcttgccgatctcgcggtccacatcggccaggctctcgcattccataaaggccttgcgggtggagccgcccaccgggaatcctttcagataccaggcgatgtgcttgcgcagatcgtggacggccatcatctcatcgccctcataaaactcggtaagcagctcggcatgacggtgaatcacgcggcagacctcgcccagattcgggttgagccgttcgggattgccctcgaaggcgtttttgatgttggcgaacagccacggccggccctggcatccgcggccgatggccacaccgtcgcagccggtctcgcgcaccatttcgagcgcatcctcggcaccccagatatcgccattgccgaataccggaatgttgaggtgttccttgagctcgccgatgcgggaccagtcggaatgaccgccatagtattcggcggtggtacgggcatgcagggttacggccttgcagccctcctcctgcgcgatgtgtccggcttcgaggaaggtctcatggttatggtcgatgccgacgcggatcttcgcggtgacggggatgcccgccggctcgcatacggcgaccacgcgctgtaatagctcagtgaaaatgtcggttttccaaggcaaggccgaaccaccgcctcgacgagtgaccttgggcaccgggcaaccgaagttcagatccacatggtcggccatgttgccgtcgaccacgattttcgccgcctgttcggtgatggaggggttcacgccgtacaactgcagtgaacggattttttcgcttttggcgaaatgacagaggcgcagtgctttcgggttatgcgccacgagggctcgagcggtgatcatctcggccacgtagagtccatcgggaccgtattcctcgcaaatcacgcggaagggccagttggtcactcccgccatcggcgagagcaccaccggggtcggcacggtgatgttgccgagttggaccggggcgatatgcaccggggtcccggggcgcgccggcgcgtccgtacgtgggtcgaggttgtcggtctcgtgatgctcggtgagcactgtttcggattcggattgtgccatgtgattcctaagaaaataagtaggggctcccctgagagaggagccccggcgtctatcgccgccacttcgcctacaaacagcccactgggatgttttccttacggctcagcccacagaggggagcccaagttgtgcgactccggcttagtacaggccgccggcttcctgaacgccggactcaggccaaggctcaccgcccatttccacgggcttcaggggcacgcgggtgcgcttctcgccgatgcgggcggccacgtaatcggccaccttgtcaagagcgacgcgctcctgggccatggtgtcacgctcacggatggtcacggcgtggtcctcgagggtgtcgaagtccacggtgatgcacagcggggtgccgatctcgtcctgacgacggtaacgacgaccgatggcaccggactcgtcgtagtcgatcatccactcgttgaagcgcaggtcgtcggccaggttctgggccacggtctgcagttcaggcttcttgctcagcggcagcacggcggccttgaccggggccagacgcgggtcgagacgcagcacggtgcgcttgtcaacgccgcccttggtgttcggggcctcgtccacatcgtaggcgtccacgaggaagcacatcagggagcgggtcaggccggcggccggttcgatgacgtacggcacgtacttctcgccggtggcctggttgaagtagctcagatcttcgccggagtgcttggagtgcgcgctcaaatcgtaatcggtacggttggcgatgccttcgagctcgccccagtcggaaccctggaagccgaacttgtattcgatgtccacggtgcgcttggagtagtgggagagcttctccttcggatgctcgtagtggcgcaggttctccggcttgacgccgaggtcgatgtaccagcgggtgcgggcgtcgatccagtactggtgccattcctcatcggtgccgggcgtgacgaagaactccatctccatctgctcgaactcacgggtgcggaagatgaagttacccggggtgatctcgttacggaaggacttacccatgttggcgatgccgaacggcggcctggaacgggaagaggtcatcacgttcttgaagtccacgaagatgccctgtgcagtctccggacgcaggtagtgcaggctgttctcgtcctcgaccgggccgaggtgggtgcgcagcatcatgttgaagtcgcgcggttcggtccactggccacgggtgccgcagttcgggcagacgatgtccttcatgccgttttccggcatcttgtcgccgtgcttctcggcgtaggattcctcgagcttgtcggcgcggttgcgcttgtggcagttgagacactcgacgagcggatcgttgaacacgctcacgtggccggacgccacccacacttcgggcggcagaatgatggaagtgtcgacaccgacgacatcaggacgggtgacgaccatggagcgccaccattcacgcttgatattgtccttgagagcgacgccgagagggccgtaatcccaagcggaacgggtgccgccgtaaatttcgccggcggggaacacgaagccgcgacgcttcgcaagggatacgacttcatcgagtttggactgagccacaatgcaccttctggtttgaacggtttggggtctaataacaaccgcttcaggatagccgtatatggtgacaggtcaggcggcattgtccggtatatgttccgcgtctcacgagcggccgttcgcagcgattcctatatcgcaacacctccatattgttcctgttgttttacccttcccgaatttgtgccactgacatcgcgtcagcgtcacaaattcgggagatgttgctcggcggaggcgtctatgtatcacgaatggacggggacgcgccagacctgacgacacgtatcgaacaaatccgtcacgataatgtccatgttggcgcatagcgtcggcactgtaatgcaggggaactcgcatgtggttcgcgagttgagaaaggcctgagcctgacccttagaacctgttggttaagaccatcgtagggagcagtaaatgagcaatagtgcatcatcgtttaccggcgtgtccagcggttataccgccgggactccggttccagccgattcacccatccgtgacaatatcgccgatgccgttcgccgcgtacgcgagacgactccgttggcccagtcattcaccaattttgtgaccatcaatttggttgccaacgcgcaactggcggccggcggcactgcggccatgagtttcctgccggacgacgtgatcgaaaccgcgaaaatcgcgggcgcgaactacatcaacgtgggcacgctgctgccgttctataaggacgcactgcccgaaatcgcccagcgactcaactacttggacaagccgtgggtgctcgacccggtggccgccggcatcggccgcacccgtaccgccattcttcaggccttcaaggccgctcccccgaccatgattcgcgcgaatgcatccgaggtaatcgcgctggcgaacatgtgggggctcaataccgaaaccgtgggggacgcttccgagcaccgccccgccggagtggaatccgtcgacgacgtggagtccgcaaccggcgcggcggtggcgctggcacagtatctgaccgaacagcacgccaagcattcctcccatgacgcttccacccgctgcgccgtggccgtgtccggcatcgccgatctggtgaccgatggcgaaaccgtgtaccgactgccgggcggcagcgcgatgatgaccaagatcaccggtgccggctgctcgctgggcggcgtggctgccacgtatttggcggtctccgatccgttgaccgccgccctgtccgcgtctctgctgtacaaccgcgcgggagaggtggccgatacaacttcgcacggaccgggctcgttccaagttgcgttccttgacgcgctgtggaatgtgaccgccgaacaggtggcggaatccgagattttggtgcagtagtttcagttccctctgatgagggagctcataacagttttttccaataagacttccacaagaaacaacaaaagcaggaataataatgagtaatgaatacccatacgcctccatgcgcgacagcttcgacctgtccgcgtacttcgtggtggggccggaggactgcaaaggccgtccgctgaccgacgtggtggatcaggctctgcacggcggcgcaaccttcatccaactgcgcgccaaggaggccgatgcctctgagctgaccgacatggctcgcgacatcgcgcaaatcatcgaggacaatgagaagtccgattccgtggcctttgtgatcgacgaccgtgccgacgtggtgtggcaggcccgccgcaagggcatcaaggtggacggtgtgcacatcggccagaccgacatggagccgcgcgaagcccgcgccctgctcggcgacgaggccatcgtgggcctgtcggctgagaccgaaagcctcgttcggctcatcaacgagctgcccgacggctgcatcgactacattggcgccggtcctctgcacgtctccaccaccaagcccgaggcttccgtgggcggcaacgacggctccggcaagacgctggacgccgcccagatcaacaccatctgcgttgccagcgaattcccggtggtcgtgggcggcggcgtgaccgcagccgatatggccatgctcgccgataccaaggctgctggctggttcgtggtctccgccatcgcgggtgccgagaacccggaagaggccgcgcgcaccatggtcgaaggctggaaggccgtccgcggcgacaagaagcacggctacgctccgcgcgtcgtaacccacacccccgctactgacactcaggctgctcaggaaggggccgcgaagcccggttccgaggccactgagaagaagttcaccaacgccaaggacgccaaggatgcccagaagcttgccaagcagcagcgcgtggacatcgccgcccgtggttccaagcagcgcgacaaggcgcacatccgcaagaccaagtccgtaccgttcacctatcagtatggttcctacgacctggaagtgccgtacaccgaaatcaagctgagcgacacgcccggcgtgggcccgaacccgccgttccacgactacaacaccgaaggccccaagtgcgacccgaaggaaggcttgaagcccctgcgtctcgactggatccgcgaccgcggcgacatcgaagactacgagggccgccgccgcaaccttgaggacgatggcaagcgcgccatcaagcgcggccgcgccaccaaggaatggcgtggacgcaagcatgagccgatgcgtgccaaggaccacccgatcacccagatgtggtacgcccgccacggcatcatcaccccggagatgcagtacgtggccacccgcgagaactgcgatgtggagctcgtgcgctccgagctggccgccggccgcgcggtgatgccctgcaacatcaaccaccccgaggccgagccgatgattatcggatccgccttcctgaccaagctcaacgccaacatgggcaactcggccgtcacctcctccatcgatgaggaagtggagaagctgacgtgggccaccaagtggggcgccgataccgtgatggacctgtccaccggtaacgacatccataccacccgtgagtggattcttcgcaactcccccgtgccgatcggcaccgtgccgatgtaccaggccctcgaaaaggtcgaggatgatgcctccaagctgagctgggaactgttccgcgacaccgtaatcgaacagtgcgagcaaggtgtggattacatgaccatccacgccggcgtgctgctgcgttacgtgccgctgaccgccaaccgcgtgaccggcatcgtctcccgcggtggctccatcatggccgactggtgcctgcgccaccaccaggagagcttcctgtacacgcacttcgacgagctgtgcgacatcttcgccaagtacgacgtgacgttctctctgggcgatggcctgcgccccggctccctagccgacgcgaacgacgccgcgcagctttccgagctcatgactctgggcgagctgaccgagcgcgcctgggccaaggacgtgcaggtgatgatcgagggcccgggccacgtgccgttcgacaccgtacgcatgaacatcgagctggagaaggccgtgtgccacaacgccccgttctacaccctcggaccgctgaccaccgataccgctccgggttacgatcacatcacctccgctatcggcgccaccgagatcggtcgttacggcaccgctatgctgtgctacgtgaccccgaaggaacacctcggcctgccgaacaaggatgatgtgaagcagggcgtgattgcctacaagatcgcctgccacgccgcagacatcgccaagcaccacccgcacgcgatggatcgcgacaatgcgatttccaaggctcgcttcgagttccgttggctcgaccagttcaatctgtcctacgatccggacaccgccatcgccttccacgacgataccctgcccgccgagccggccaagatggcgcacttctgctcgatgtgcggcccgaagttctgctcgatggccatctcccagaacatccgcaaggcattcggtggcgaggccgctcagcagcaaatcgtgaaggaggctgctgcaggcatcgactccgaggcactggctacggccaaggccaatgtcgataacggcgtggtgtccgccaacgtgctcagccccgaagaaatcctcgccggcatggatgcgatgagcgaaaagtacaccgcccagggcggcaagctctactccaccgcccaggagtaaacctctctggctcccctctctgaggggagccaattattatgcccggtggtgtcttaattcgggacgacgctcgactcgctcgaaggcggtgccgaagtgtgcgccatctggaccgaggccgtcggaagtctccaggaccacgccttcgttgagcgcacggcgcacgatgcccacacggggcttcaacggccacacatcatgcggcactttgcgatagaaatccgtaccgacgagcaacacgtcgcccacatcgaacacttcctgacgcggaaatgtgagctgtgtggtgtgtccgttaggcattacgccaaaatatgcggtgagttccggtgatgcgcaccaagacgccgtcacggcgcagtacatcgttatcagctatgcctcctcccgaacatttcatgaatcaatcgcaatcagcaaaccttccccgtctcaccacaggagcggcaaaacatcaaggaaaaccgctccgaaaaacatcatgggccccacttagaatgaacactatggcacaaattgcaacatctacacttcccgctgttctcgcgatctccggctccgactcgtccggcggcgccggcatgcaggccgatctgaagaccatgctggcctgcggcgtgttcggcatgagcgccatcaccgcgctcaccgcacagaacaccaccggcgtgcgttccattcaggacaccaaaccggacattctcgccgaccagatcaacatggtgtttgaggatattccgccggtcgcggtgaaaatcggcatggtgtctgccactgacatcatcgacgtcatcgctgaacgactcaccttccatcacgccacgaacatcgtgctcgacccggttatggtggccacttccggtgccaatctcatcagtgacgatgccattgcggccttgaccggcaagctgttcccgatggccacggtcgtgactccgaacattcccgaggccgaagtgctgaccgatacgctgattcgcgatcaggaggatatggaggccgccgcccaccgcctcgtggagcgttatggctgtgccgcgctggtcaagggtggtcatggcaccgaggatgccaacgatgtgcttgccgagacggatggaaccgtgacctggtttgatggcgcgcgtatcaataatccgaacacgcacggcaccggatgcacgctgagctccgccatcgcctcgtatctggcgcttggcgacacattgcccaaggccatcaagcatgcgaagaagtatctgaccggtgcactgaaggcccagctgaatcttggccacggctccggcccgatggatcatttctggaagtatcgctgagtcctactggctctcctctctgaggggagccaagtaataaaaggagaattatgattattgaccgtaatgccgttactcaggaagtgccgatcgacccggaaaccggcaaaccgtacctcaataccgtggccgccattcaggtgtcggccaatggcgtgggctccgaggtttcgccatacgtggctcaggccgtcgaggtgattcgcgaatccggcctgccgcaggaaaccaacgccctgttcaccaacgtggaaggcgatctggacgacgtgctcaaggtggccggtgaggccgccaagaagctcgccgagcagggctaccgcacttctctggtgctgcacatggatatccgccccggcttcaccggccaactgaccgaaaagcccaagctggtggatgagatcctcgccgacaagcaggcgaagtagcaaagcatcgcttccaccagcaagggcatgctttgttattacacgtttcatggggcggtagctcacccatggggtggtaaaaccctcatggggcggtagtcgaaaacggctctattctgcggaaaggcataatccgctaaccgccccatgggccaaataccgccccatgagtgttttaccgccccatgggaatcacggttctgccttctttcgacggggtaagagcgtaagtggggcatatataggagcgtcacaacctctgttatcgttcacgatgtgaccgcaacgcggcgtgccacaaaatcgaacctatagttaagccccatgtagtgagctatctcacaacgattggctcgctacgtagaattcaagacttggatcgcaaacgtcgttcatcccacacaatgggagggcgaacggaacacacagtccaatcaagagttcgctcgccgcaacaccattgagcagttgcacgcgggcaggtttgcaagaagagggctcaaatatgactgctgctgaacagcagatttccggcaatcccgcagctatggaaaacgcacaagcacgtaccaccgtgacggatcaagccaaggttcaggatattatctcgcgcatggatcgcgcacatgaaaccccgatgttccatcgcatcgtgacgctggtcgccgctggcatgctgatggacagcatcgacgtatatattggcagcgccgtcgcctccagcacgttggctacccgctggtccaccgttgcgcaaaattccacctttatgtccgcgggcttcctgggtctgctggtcggttcgctgctggccggcttcgtcggtgacctgaagggccgccgcgtggcttaccaaatcaacctgctgctgtttggcggcttcaccttcctcggcgcattcgccccgaacatggctgtgctgtccctgtgccgtctgggtgccggcctgggcctcggcgctgaaatcgtcaccggcttcgccatggtcaacgagttcgcaccgatgaaccgccgtggccactggtgcgcgattgtctcgctcgtggccaactgcggtgtgccaatcgctatgctgctgtgtgcatggatcatcccccgctggtcctggcgtccgctgttcgtggccatcggcctggtggccgccatcatctggtggctgcgccgcgacatccccgaatccccgcgttggctcgccgtgcgcggccgttacgatgaggccgacgccatcgtcaagcagcttgaggccaacggttccgaaccgatcgacgcagccgccaaggccgacaccagcgacacccgcaacgccggaggccgttcgctcggcatctgcctgcttgtggctgtggttgctgtggccgccacgaacgtgtgctcctacgccttcacttcttgggttccgacgattctggtcaagcgtggtattaacctgtccagctcgctgctcacctccacggtgatgatgctcggtgccccggtcggctgcctgattggctctctgcttatcgaccgtatcggccgcaagcgcacgattgtgccggccttcctgttcactggcgtgttcggtttgatgtatgccttccagacctctaccgtgagcgcaattatcgttggcttcctgctcatgatgtgcctgtacgtgcttatggcttccgtggtggctgtgtacgctccggaactgttcgccaccaaggttcgcttccgttgcgtcggcttcgcgaacgccgtggccaagctgctcaatgtgttgatgccgatggtggtgggctggatgcttacctcgcttggtgccacgtccatctttgtggccatcagcgcgattgctattgcatcgatgctgattgtcggcttctttggcgcggagactgcgcagaagtcggttgggtgatcggtttcctcacagtggaataactgctgataatgtccattcggcgtcttgcgtggtgatatgcagggcgccgttttgttgttctagtaattgttggtaacggttgaggccggtgccggtggataggtctgcgtctccagcggacaatcagcgtctgtgatgtcacatgcaatgccaggagcggcatcaacggtcgaatcatgcggagtcactgcactgtgcgccgcttctcccctgccttcaatcacatcaatgacttgatgcgtgcgatccaatgcgcccatagacatatccgtaaccagcacgtcaggccgcttggtggggctcaggcatcggctgatggccacagcacccaaatcgcaggtctatatcacggcaaaatcgctggacatacgttcgattagcgcgccgaacactttcagcgcatatgggtcattgtccacaatgccgatgcgtatgttgcggttgcgcgcttcttccattacattcaccccttcagtgtgcccgacgccgaactactccgtcctgacacgtcatggtcactatgacaactatcattccacatttcctgcgtgatttacgatggaatcatcatcaatccttgacaaggcggtaaaggaggacggcaatgaaccgtgcacaagcactcagcaagctcaacaggagcgatatgcgcaatgccgccgccgagcgcgggatgcaacgactgttcacatggaaccgcgcgcattggattggcatggttgtactgatagcggtgttgctgctactgcagtggagctcatcaatgtatctcatgcccgacgaggttcttgacagggctgccaaaaacctgttcgtatggttccccggtatggttctgcactggccattggtgttgggaatcaccaacttgatactcggttcgacacgatccggcagtctgtctttcccgttggcgagcgcaatcatcggaccactggcattcggctggaccaatcttcgcttacggccggggttcccataccgttcctgggctcaagggaaagccgcaatataatgaaaacagcgatttcatgcaatgatgcacgagccgatccaagcaaaggggccaaccatgagcgagcaactgatggaacagtaccggttgcgcggacaacgcaaatgccgtaacgcttgtatcgccgccatcgtgacagtagtgcttgtccttgccgtcgccggcggcgtatggtggacggccggcgatggcagcgcattggttcgcaatatgttcaagccgaaggccacgcctgccacgcagccggtagtcaacagcaccgcaaccttcgcctaccgcaccgcaccggaattcctggcgatggaagccggcgaccgaggcaccggcaatgtgaactactctcctgcttcgatgtggatggcgttggccatcgccgcgcagggcgccaatggcacgacccgctcgcaactgaacgaactgctgggctccggttcgctgaccgatagcgactaccaatcgctgctaagttcgatcaacgggcaatattcgggggcgaaatccgagatgagcgccgcgaactcgctgtggattgatgacgactactctcttgccagcgattaccaatccaccgtcaagaagatgttcgaggccgaagtcaccacgttaccgttcgacgatcaggccggcgcaaagatgtccgattggatcgccaagcatacgaatggttcgctcaagccgaagatcacgctgcgtgaccgtgaagtcctgtccatcatcaacaccgtctatgcggatggccgttggaaggatccgttcgaagagcagtccaccggcaacggcaccttccacggcgaagccggagatgctcaggtgccgatgatgcaccggaccttcagccaaatggcttacggacatgatgagtacaacacttggcagcgggtggagattccgttcgacaacggcggcaatctggccatcgtgctgccggccgaagggcatttcgacgagttggccggcgatgccgagaagctcagttgggcgttcggtacatgctcgacggcttcccttggcgagggcgcaatgggttgcgccgcggacagtatgcccggatggggcgtctccgtcaactcggtcatggtgaacgtcacgctaccgcgattcaccatcgacagcatgttcgactcggaagccaccatcaaggcattcgaaaaactgggggtgaccgatgcgttcagtgcaggcgacgccgacttcaccaagatgatcgacaccggttcgcacggcgagaacctgtatatcggctcgattctgcaaggcacgcgcatcgaggtgaacgaagccggcgccaaggccatgtccttcaccaaggtcggcgcagactccgttagcgcgccggtggacaacgtcgagttcacggtggatcgcccatttctgtattcgtacgtcaccccggacggcataccattattcatcggtgcggtgcgcaacctcggcggagtcggtggagaaaactgatactttcctggcagtccgtcaattagggtgtatcgtttgacgcatggttacgatgaaggaaatcgcgaacaaggtgggggtttccgtctctacggtatcgctggtgctcaacggacgcgacgaggggcgcgtaaagtccaaaattgcggacaatgtacgcgccatcgccaccaagctcggctaccagtcgaatccgctggccagttcgctgcgtacaggcaggacgcacatcctcggtttcatcagtgaggaggtggccaccaccccgtacgccggcggtatgattctgggcgcgcagaccgctgcaagccagttcggctatatgctcatcaccgtgagcaccgacggcgagaacagcgagagcgaggaaatcgccgcactcaagcgatacggcaccgacggctttctgtacgccaagatgtcgaaccgcatcacccatgtgccttcctcgctggccaagacgccactggtgttggtggatgccaccgactcgcttggcaaaatcccgagcgtggaaccggacgagttccaaatcggctacgacgccaccaccagattggttaaggccggatgcgcacgtatcgcctatgtgggttgcttggagccgctgattgcgcaggacgatcgtttggaaggctatcaggcggcgctcagggacgccggcctcgactatgacgatcatctggtcgtcaatgtgctcaacaacgggccggcactgaccgcagtcagcgatttgttcgatgccgagcatccggacggattcttctgcttcaacgatgcccgcgcctggtatgtgtacgaatgcgccgcacgccgaggactcacggtcggcaaggacatctccgtggtcggcgtggacaaccatcgcgtgttcgccgaaacgctggaaccgatgctcaccactgtggaactgccgcatttcgagatgggctactgggccgtggccaagctggtgtcgattatcgaaggacgctcgatggacgacgtctcatggccagcgaccaccgctcccctgccgccgatcgacgcgccgattccggcgaagatccactgcacgctgatcgaaaaggcctcggtgaagtaaccgagtcccacacgatttctcaaggcctccgttcagcacggaggccttttgcgtgtcgaacggatacgacacgccgatttacgtcaatcgattgacgtaaatcgattgacgtcgcataataattactacgcaacaacttctacaaaggcacggccgcccgagcagaagcgttacataaccaataaccaaccaagtagtaatcaaaggatgattatggcaagtgcaaccaaatctgcatggaagaatccttcctatctgcagagctctttcggcatcttcatgttcttctgctcctggggcatctggtggtccttcttccagcgctggctcatctcaggcgttggattgaccaatgctgaagtcggcaccatctactccatcaactcgctggccaccctggtcatcatgtttgtgtacggcgtgattcaggatcagctcggcatcaagcgcaagctcgtcatcgtagtctcggtaatcgccgcctgcgttggcccattcgtccaattcgtttacgccccgatgatcctcgccggtggcaccacccgctggatcggcgcactcatcggctccatcgttctgtctgccggcttcatgtccggctgctccctgttcgaggccgtcaccgaacgctactcccgtaaattcggtttcgaatatggccagtcccgtgcttggggctccttcggttacgccatcgtggcgctgtgcgccggcttcctgttcaacatcaacccgctgatcaacttctgggtcggctccgcattcggccttggcatgctcctcgtgtacgccttctgggtcccggccgagcagaaggaagagctcaagaaggaaaccgacccgaacgcagcccccaccaacccgtccctcaaggaaatggtcgccgttctcaagatgccgaccctgtgggtgctcatcgtcttcatgctgctgaccaacaccttctacaccgtgttcgatcagcagatgttcccgacctactacgccaacctcttccccactgaagaaatcggcaacgccacctacggcaccctgaacggtttccaggtcttccttgagtctgcaatgatgggcgtggtcccgatcatcatgaagaagatcggcgtgcgcaacgctctgctgctcggcgctaccgtgatgttcctgcgcatcggcttgtgcggcgtgttccacgacccgatcaccgtctccatcgtcaagctgttccactccatcgaagtgccgctgttctgcctgccggcattccgctacttcactctgcacttcgacaccaagctctctgccacgctgtacatggtgggcttccagatcgcttcccaagtgggtcaggtcatcttctcgacccctctgggtgccttccacgacaagatggctcagattctgccgaacaacgacatgggatcccgcgtgaccttctgggtcatctctgccatcgtgctgtgcgcactgatttacggcttcttcgtcatcaagcatgatgatcaggaagtcggcggcgacccgttctacaccgacaagcagctgcgccagatggaagcggcccaggcctgaaaggacagccatgactgacttcactcccgaaacccctgttctcacccccatccgcgaccatgccgctgaactggcaaaagccgaagccggcgtggctgagatggccgccaagcgcaacaaccgctggtacccgaagtatcacatcgcctccaacggtggctggatcaacgacccgaacggcctgtgcttctacaagggccgttggcacgtgttctaccagctgcacccctacggcacccagtggggtccgatgcactggggccacgtctcctccaccgacatgctcaactggaagcgcgagcccatcatgttcgcaccgtctctagagcaggagaaggacggcgtgttctccggttctgccgtcatcgacgacaacggagaccttcgcttctactacaccggccaccgttgggccaacggccacgacaacaccggcggcgactggcaggtgcagatgaccgcgctgccggacaatgacgagctcacctccgccaccaagcagggcatgatcatcgactgcccgaccgacaaggtcgaccaccactaccgcgacccgaaggtctggaagaccggcgacacctggtacatgaccttcggtgtctcctctgcggacaagcgcggccagatgtggctgttctcctccaaggacatggtccgctgggaatacgagcgcgtgctcttccagcacccggatccggatgtgttcatgctcgaatgccccgacttcttccccatcaaagacaaggacggcaacgagaagtgggtcattggcttctccgccatggggtccaagcccagcggcttcatgaaccgcaacgtcagcaacgccggctacatgatcggcacgtgggagccgggcggcgaattcaagccggaaaccgagttccgcctgtgggattgcggccacaactactacgccccgcagtccttcaatgtggacggccgtcagatcgtctatggctggatgagcccgttcgtgcagccgattcccatggaggatgacggctggtgtggccagctcaccctgccgcgcgagatcacccttggcgatgacggcgacgtggtcaccgcaccggtcgccgaaatggaaggcctgcgcgaggataccctcgaccatggttcggtcacactcgacatggatggcgagcagatcatcgccgacgacgccgaggccgtggaaatcgaaatgaccatcgacttggctgcctccactgccgagcgtgcgggtctgaagattcacgccactgaggacggtgcctacacctacgtggcttatgacggccagatcggccgcgtggtggtggatcgtcaggccatggccaacggcgatcgcggctaccgcgccgccccactgaccgacgccgaactggcctccggcaagctggacctgcgcgtgttcgtggatcgcggctccgtggaggtctacgtcaacggtggccaccaagtgctgagctcctactcctacgcctccgaaggcccgcgcgccatcaagctcgtcgccgagtccggtagtctcaaggtggattccctgaagctccaccacatgaagtccatcggactggagtagctctttcacctccctctgacgagggaggtttttttgtgcgccctgtcgttcgccttcgcctatactgatggacggcatataacacgatccatcacacgaccggcaggcgcgcaggctcctcaccttactgttccacgccccggccgcaagcgccaccagcaaaccggactggcgcggaaagcaaggtgacatcccatgtccatcgccaagcgcctcaagcgccgcatgcccaccgtcatcgccgtcatcgtattgctggcagtctgggaaacgtgggtggatctaggacatgtctcccccacgatgatctccgcgccaagcgagattttcgccgccaccatcgaaacatggaacacgctcggcccggccgcggcaatcaccggctatgagggcgtggtcggcttcctgtttgccgtgttcttcggcattatgatcggcattgcactgtactgctcgcacacgttcaacgcggcgttctatccgctgcttgccgccgcacaaaccatgccgctgatttccatcgccccgttgttcctgatttggttcggttttgagatttccggcaaaatcgtaatcgtggcggtattcggcctcttccccatcgccgtgcagactgtgcgcggactagaagcagtgccccagttctattccgacgtcgcattgacctgcggcgcgaccccggtctggacgctctggcacgtgaagctgcgcgttgccgcacgtcagatctatggcggtatccgagtatctgccgcatacatcttcgccacggcatccaccgctgaataccttggcgcacgcaagggccttggcatctggctgcaggctgcctacaattcattccgcacgccgctgatcttctccgccaccatcgtcattatcctgatgacatgcgtactgatgctggcggtaaacgccagcgagcgcatcctgctcggcccggccggcgacgacgaagaccccgacgcggaccagtagttctttttttaccgtcaaaggcacgagccggcagccaggaccgactgaacgaggcggcttctcatgaggtctccaaccctgtctctataatggaacagctttaccagcgtgtggcaaaccggctttcccgagctttcatagggaatgtcgggggcgctggtcgaacggaaatcaaggccctccatatcgttttctgccgacttccgttcgaagcaatcccagagaacgatagagagacaacgaattagggaaccatcattatgaagaaaagccttgtatccaaggccgctgccctcgtgggcgcccttgccatgactttcggtttcgccgcatgtggccagaccaacaccgccgactcctccaactccaacacctccgacctcaagaaggtcactttcatgctttcctgggcacccgataccaaccacatcggcgtgtacgtggccaagaacaagggctacttcaaggacgccggccttgacgtggatatcgtggccgtagcccaggccggtgccgaacaggccgtgaacaacggtgtggccgacttcgccctgtccaacctgaccaacgtgggcgtctacacgctgaagggcgcgcacatcaagcaggtgctgcaggtgcagcagaagccgagcgccatttggtgcgcactggcgtccaacaccgccatcaagtcccctaaggatttggatggcaagaccttcgccaccttcggctccaacgagtccgatgccgtggtgcgccgcatgatccaaaccgatggaggcaagggcgaattcgacaaggtgaccgtcggcacctccaccttccagaccatggaatccggcaaggccgatttcggcggcttctacgccacgtgggaaggcgtgcaagccgacatgtacggcccgaagctcaactgcttcaccgagcctgactatggcgtgcccggcaacgccgacaccatcggcatcatcaccaatgacaagaccatcaagaacaatcccgacctggtcaagaagttcactcaggccactcaaaagggttacgagtacgcgtacgccaacccggatgacgccgcgcagattctcgtggacgaagcccctgacgccaacctcaagcccgaattcgtcaagaagagcatgcaggttatcgtcgacggccagtactggggcgatccggccaagatcaaggacggctctttcgtgctcggcaccaacgacttcaagggcgctcaggaatacttcgacttcctggctgaagaagacgcatacaccgacagtcatgacaagataattcatgaggccccgcaggccaaggaccttgccaccgacgaattcatcggcaagtaatttccgatattccgagtttgaatctacgcaaaaatgcgtccttcccatgaggaaaggacgcatttttgcgtatcggccgataaggttattcatagcggattacgctaacaaggagacgattctatggtccaatgtcctgaccgcattattgccagcatagatacgggtgttgatgatgcgttggcgttggcgtatttgttggggtcgacggatgagtgcgagttgggtggcgtgattgccagttatggcaatgtggatgcgaacacggcttatgccaatacttgcgcggtgcttgatttgtttggtcgggcggatattccagtgtttttagggtctgagcatccttcttgggctgatgcgtttattcctgatgcagggtgtgcccagttccacggggatgatggactggggaatactcggctggcagggtccggggctctggctgatggagcttgtgtgcctggtgatgatatgtctgtggatgtgcccgatgaggttgtttctgttggcgggtatttggcgggggatgttcatgctcatccggcgttgggtgcttgttctcgtgtgaaccgctctcagtcggtggaccatccccagtcggctatgccgacagctctcgccagcgggggcaaaaggaggtgctccgttgatgctgcggatgggattgagtatctgattgagcaggttcgcgagtttggccgagacgttaccgtgctggctaccgggccgttgacggatgtggatgcggctattactcgagcaccggatattgcatcgaaactcaggctggtgatgatgggcggtacgcttacccaacccggtaattgttgggatgcggtagctgagacgaatatcatccaagaccctgaggccgcgaatcgtgtatttcattccggcgcagacatcacaatggtgggacttgatgtgactcaccagtgtttgctaccgcaatcggcggccgaccggtggcgtgcgacggggaccaagcgcgggcggttcttggctgatctcgcggacttttccatcaaggcaaatttggaagccgaccccgcactgttctctggcggcatgccgttgcatgatccgttggcggcggcggttgcacttgattcttcactggtcgattgttttgatcttgcgttgcgcgcggagaccaataccggtgatttcaatggagtacgaggccggaccaccggagacccggttgggctggtgaatcattccatgccgcatgtgcatgtggcacttggtgtggattcgggacgttttttggatgagtttgtagagaggatggctgaggtgtgccggtaactcccctcagtccgctacacgggcagctcgaccgcaattacggacaagctgccgctcgcattcttctggctcgactctcgtctcgccttcgcctacaaacagtccaccgggcgtttgctttacggctcagcccgtcagagggggcctaacaaggactatttcacaccgccgaatcggcgatcgcggtggatgtaatggtcgatggagcgccatagcacgtcacggccgcagtccgggaagagttcgggcacgaagtcgagctcggcgtaggcggcctcccacggcaggaagttggaggtgcgctgttcgccggaagtacggatcaccaagtcgcaatcgggaatgtccggattgtacagatggtcggcaatcatcttctcagtcacacggtcgccggaaatcttgccatcgcgcacttcgcgagcgatggcggcgcaggcgtcggcgatttcagcacggccaccatagttgatgcagaacaccacatcgatgaccttgttgttcttggtgcgctcctcggcggcttcaagctcgtcgatcaccgacttccacagcttggggcgacggccggaccagcgcacgcgcacaccccactcgtccatctgttccacacgacggtggatgatttcacgcgagaaacccatgaggaagcgcacttcctgtggcgagcgcttccagttttcagtggagaacgtgtacaggctcaaataccgtacaccggcttcgatggcaccggcgatagtgtcgaacaccaccggttcggcggcctgatggccattggtgcggaccatgccgcgctgcttggcccaacgaccattaccgtccataatcacaccgatatggcggggtaccttgttcttggggaagtcgggaatacgagcggggtcgctgaacggagctgcgggaatgtccaacgacgtgtaatcaacgttctcaaaagccatactcatgaatctatcaagcgcagcgaacgaatcgggcgttcgaggtaatactccccccaatcttcaaccaactcctgcacaacccgctccacaggcgcggcatcaagcaccgaccaatcgccacgaatcagtgcatcgaactggtttaacacgaacggtgcgatacggcgcgcatcggtagtgtggtcggcttcgcacatcacaccgccggacgcgatggacaggtacgccggctccgccttgccgcataccacgcaagtgcccaatcgtggcgtccaaccggccaaggccaaggcgcgcatcacataggagtcgcctatggcttgcggggcgtgggattgtttggcgagcgcgttcaacgcgccgatgagcagccgatattggttcggcagctgctcatgttcggtgctggcgattttatcgatagtctcaacgatgacgttggcggcctcatacgccgcataatccgccgcgatcggagcaccataagcggcgaccgcttcagcttgggagaccacgtcaagcgagcggccttcagcgataagcacatcgactcgcatgaacggctcgagcctggcaccaaagcgtgatttggtgcgacgtacgcctttggcgaccgcccgaatcttgccatgcccacgcgtcaggatggtgatgatacgatcagcctcgcccagtttggaggtgcgcaacaccacaccttcgtctcggtacagcgacatctcatctcctttcccgcgacgcctggcagactctactcaatgaagtagtcagtaaataaacagaccccagaaggcgaacaccaacagtatgtacagcatggtgaaggccaccagccagaacaggattcggcccagacgggtggaggccagtaccgggtcagcaccggtgacgatgtctcgaacggattcgcgacgagggggtatctgaatcaggccgcggacggaagcgacttctatcagatgcataaagacgcgggaccaagcccatagcaccagcacggacaccacttggatgaccggccagctccaatacatgacacccggcgtctcggtaggtgcgctaccccatgcaagtttgaccacgcccatgatcacctgcccgagtccggcgaagaagatgagcaatgtggcaagagtggtgagggtcaaagtcagcagcgcattgccgaaaccatgtgcgaaaccgagtaccacaggccgtcccggtatcagcatgcccgcatgtttggcctcgcgcttctctcgccgccatcgggcatccgccgcgattttgcgacccagcgccaccagtgccagcacgatggatgcgagcagcagcagtaccaccgtgacgtgcagaatcacaccatatatggtgccgacgcgtcttgccttcaaagcgcccggcagaccgattgattggtacagattggtgccggccaccttttcactggtctgcgtgagtccggcggaagtgccgacggcccagtcgatgagatcgtccacataggcgtccgcaaacggggtgcccgcttcggactcatctcccaaacgcagcacatggttggcgaccgggtagctgcgcacggtcacattccagttatcggctttgtgggcgttgtagagaatcgcacgcacaccgtcgacctgcgccgtcatcacgtctttcgaaccgtaagccacataggtgggtacggcgtaggcggcgggtttgagtgtggcgaggtcgaaattgttcagtccgaacaggccggtgtccgcgctgaacacacgttggacgatggattgatagccttcgttcgcgccaacaagggtgaagtcttgggtgacgaaaaatcccagcgattggcgtgggctgaacaccatcgggctcaggagaatctggaaggcgatgtccggatcgtcctcgagcagatacgaggagatccatgtcgattcggaggtggcatagatgccgaccttggcctcgtctacatcgctttggtctcgcaggtattcgatgacctgatcataagccttggctgaggccggataatcgcggttgatgtcggtggtgttccagacgggtttgtcgagcactgcggtcacaaagccggccgaagccataccggaggccacgtcgccaaaggagttgtcacaggtgccgtatccggcaccgtgcatgaacaccacgccggggcgcttgcctgatgcgttctgaggttcccgaatcaataccttgatggcttggacgccgtccgcattggccttgccccgagcaccggactccttggtcagattgccgtcgccggtcatgttcagcgtgatgtatcgctcggtgacctcatacgtgccttttgccggcagcgtttctccggacgggttatcgaaggtgacttcggtatcgtcggtgagcgtggccatcgactggccggtgggttcgatgttccaaggcaccgtggtcagattggaaatggagaccagcacgccaatcaggataatgaagatgggcaggctgaccatcagccggtgggtgctggtccacggcttggatcgaacagtcaggcgatgctcttcttcttgcggcacgtgcgctattgtaatctgaccgcgatatttatgccgagggcctattcggccgaatcagtgaccggggtgctggattgggaccacgaccgggccggtggaattgacggggacttgaccgtcggcctccatttgggcggcgatatcgttcgctatggtgagcagcgtgtcgacgatctggtcttcgggcacggtcttgatgaccttgcccttgatgaagatctggcccttgccattgccggaggccacgccgaggtcggcttcgcgtgcctcgcccggaccgttgacgatgcagcccatgacggccactcggatcggcgcggtcacgtccttcaggccttcggtgacggcggaggcgagctggatcacatccacttgggcgcggccgcagctcgggcaggagatgatgtcgaacttgcgggggcgcaatcccatgtattccaagagtttgcaacccaccttgacctcttcggccggcggcgcggagagagacacgcgaatcgtgtcgccaatgccctcggccaagagcgcaccgaacgccaggcaggatttgatggtgccttgccaagcggggccggcctcggtgacgccgaggtgcagcggccaatcgcccttggaagcgagcagtcggtacgtttcgaccatggtgatgacgtcatggtgtttgacggagatcttgaaatcgtggaagccgacgtcctcgaacatgtgcgcttccttcaaggcagaggccaccaatgcttccggagtcgggccaccgtatttggcgtagagttccttgtccagcgagccggcgttcacaccgatacgcagcgagatgcccgcgtcggtggcggccttgcagatgtccgggccgacttcgtcgaacttacggatgttgccggggttcacgcgcacggccgcgcagccggcgtcgatggcctggaacacgtatttggactggaagtggatatcggcgatgaccggaatcggcgatttgcggcagatttccggcagtgcgtcggcatcgtcctgactcggcacggccacgcgcacgatgtcgcagccggcggcggtcagttcggcgatctgctgcaacgtggcaggtacgttggccgtgagcgtgttggtcatcgactgcacggagatgggcgcgcccccgcccaccggcaccgggcccaccatgatgcggcgggacttgcggcgcgggtgcaagggcgattcgctggtcaggtcgaccggatcaccggttttgcggaacggcttttcgatgggattttccgtattcaaggtattcatcattgcttgtttatcaggtcgtcggcgcgtcggcgggcttcaagctcaagctggttcatttcctccacgtccgtgaacagcgggttaccacgaagctcggcgtccatctggtccagcacggctttgaccgtgtccacgatgccgaggtatggcagacgatgctcgaggaaggcatgcacggcctgttcattggcagcattgagcaccgccgtatgcttctcggaggcggccaggcagtggcgggccagttgcacggcagggaacgcctcatcgtccaacggttcaaaggtccaagttgcggcttgcgtccagtcgcacgcggcggccacattggtcatgcggtccggcgcggacagacccagcgcgatgggcagacgcatgtctggcggcgaagcttggcaaatcgtggcgccgtccacaaattcaaccatggaatggacgatggactgcgggtgcacggtcacgtcgatgcgttcaggcggcacgttgaacaagcgggacgcctcgatgacttcgaggcccttgttcatcagtgtggaggagttgatggtgacaaccggccccatgttccacgtcggatgatgcagcgcctgctcgggagtgatgttctccatgtcggcacgtttccagccgcggaacggtccgccggaggcggtgaccacaagcttggcgacttcggcgtgggttccggagcgcagggattgccagatggcggaatgctcggaatcgaccgggttgatttggttctcgcgcacttgcgcgctgaacagcagatgcccgcccgcgactacggactccttgttggccaatgccagctgggaaccggccttgagcgccgcgatcgacggttcgaggccgatggagccggtgatgccgttcaatacgacattcgcaccggagccggccatggcgatgaccgaatccggaccgccggtcacgcggacaccttgtgcgccggcctgtgcgagagctgcttgcagcgctggaaccttggtctcatcaaacaccgcggcttcggacacatggaactgtgcggcctgttgcgccagcagctcgatatgtgctccgcccgccgccagaccggtgacggtaaatcgttcaggatgacgcgagatgacgtcaagtccttgggtgccgatggatccggtggatccgagaatgatgacagtggagttggaggctatgctcactgttccttcttcgtatcgtcattgttcagtgtggggaacgacaggtcggggatatccgaatcgaagttaccgccaagcgggaacagcagcgggaacgaatcgctggaatcgtgcttatcctgtgacggctgagctgcttccgtgtcatgggaggcggcaacgtattcagatgattccgcagccggacgggagatcgtgctgtctgcaggctgactatcggatacgcgaaccggaatggagttcgtgttacgatccggcttgctggtgggagcaaaggagaccggcatagcagcggacgcagcctcgtcagcagtgctattcacaggctgtactgccggggcggagggtgccggggatgaaaccgaacccggtacctcattcaatttcagcgcattcggtgcatcaaggctgggcatcttaggagcgaaggacggtgcatccactgccggaagttcctgagaaaccgcagccatgtgggcgagagcggccaaagaggaatcgttctgcaccatatccacgggctgttccgcgaacaccgacggggtcgatgacggagctgcgggttcgtgagctgcctgtgccggagcaaacgaggggacgctgccagcggtcacaccggaaaccggcgcggacggggcactgacgggaggctcagccgcagcaactgcggtaggagccacggaaggcgtctcggagacgggcttcgccgcagactcgttggacgcatgcaccaggtatgctgcgggagcaaaggaaaccggctgttccgcattggtgctattggtgcttgtggaagcatcgaacgatgcaggagccggcgcataggagatcggcgccgccgcggccggcgttgcgggagcaaccggagccggagccgtgaacaagctctgctcggcctgatgcagggcatcgaatgattcgtcatgagcaacggcagccggagcaaaacgttcgtcagttgccgggcgctgcgttccggaagcgaacaacggtgagacgccgttcgcttgaacggtcacgttcgtggcggtctgggcaggagccgcaggctcgccggacacgaaatcggccacacgggcataggattccaagcgactcagcaactgtacgcaggcgttcaggaagtaatcgacctgtcgctcgtcatagcctttcttgcccttgcgctgggtgaagatcacattgttgaccgtattcgcattgagatcggccaaagaccgtacatcgtcttcggtaacgccgtcaacgcccaatgcggccgccgccttgtccacaatctggtcgaccagacgatccacctgcttcttatcgtacgaaggctgcttggacgctccggacttgaagcgttcacgctcgttacgctccgcatggttctggacttcgtgatacagcttctcggtcttcgccttccacgtcacacgcccatgctgtgcgatctcccatgtggtctgcttatcgaccacggcacgttccagacgtccaagcgcggcgtcaacctgtgcgatcacatagccgttcttgcgcaaatcaaaggacacgttctgaatgtcatgctgggtgagattcatgccctcgctgtcatacaaagcatgggcgcgctccaggaaagcgtccacctgagcggggtcatacccccacttgcgcttgcccgcacgtgcgatgcccgacttgccgtccccttcacgaagttcctgcgccatcggctattcgacctcctgctggatataaacactctgccacaactttacgtgactattgagacgcatctgaccaagaaaaccgaaattcacgattttgtagcagtactgccggtttccttctgcacgcatctcattgagatttcagaacccttgccgaagactgtcagggaatatcgtcacagcctatatccgtggaatgaggggattgcatgaagcgatgaaaaatgaaagtgggcaatgagggactcgaacccccgacatccaccgtgtaaaggtggcgctctaaccaactgagctaattgcccgcaaatgacaacaatagcgtatggccggcactgcgcgacacgtggtgtcgcatacgcgtgccgtagcgctcaatcgcgatgacattcagtcacgcccagcagcactacgcagcacacgacgccagtcaacacgcttaaagtcaagcgtattgattgaggcttatcagcgacccttgccgaatgcgcgcaggcggatgccgttccagtccgagctgacggtcagcggggtggcggcgttcataccggcggtctgtgcggcggactgcacggtggatgagctggtggcacccgggcggccgggcttgggagtcagtatccacagcgggccgtcattgcccagtaccgcgtaggcgtcaacgatcgtatcggacaattcgtcctcatcatcgccgtcacgccaccatacgatgacgccgtccacagcggagtcgtagtcctcgtccacgagatcctcgcccgtgagctcttcaatctgggcacgaatggaatcgtccacgtcgtcgtcccagagccactcctggacgatatcgccgggctcgaaaccaaattcttcagcgttctgtgatgccgtttgattcacaggggacacattagcaagtcttcgcgaacaaatgcgttaacgcggccgaaaatcgccgcattgtgggcagacccatgcgagtcgtctcatcagaaacaacgactggccgcgcatgtcaggcctcgcaatgaggcaaatcgtcggcctgccccttgccgatggccaccaacgcctgatacgcctcgtccagcgtggcgaccttgacgtcgcgcagaccatccggcacgcggccggccacatccgaacaattcgacgcgggggccaggaaccatgtggcgccatcgcgcttggagccaagcatcttcagctctatgccgccgattctgccgactttgccgtccttgtctatggtgccggtgccggcgatggtcttgccgccgctctcgttggcgggggtgagtttgtcgatgagaccgagcgtgtacatcatgcctgcggacggcccgccgatgctgtccacgtgcatcgtcaccttggcgtgttgcaatgcactggcgtcaatgcccagttcgtccgcatgggctttggcatacgccagaccgacggcactggccgaatcctgggaaccggccatgtcttgttcgactttcttctgatactggtccgcgctctggcccaccggtaccgtggcctcacgcggcatgacctccacctgcggattggaccaaccccagacggcctgcgcgttgatgatcgggtacccgggcacgccggacgcgttcaccgtggtcagcagcagcttgccggaatccttatacgtcgtcacgccggtaccagtgatgtcgataaccgcaccatcctcaactttgcccagcacatcctgggtgggtccgggcatctcgatgacgtacgggctgggcagcagcagaatcaccacaccaagcaacacggcgaatgcaccgacgaaatggcgtttcggacgagcggccgcataggcccgagcacggctgattccacgagataggcgcgaatcatgcttcacttcgaacgatggcatgtgctcatctcccgcttccgaatccgcagtcgggctctcctgctcctggacgaggtctggttcctgattcctgtggcgtgcaaacataccctacagtgtaagcggagggccgaaatcggccgaaaacgaacataaaccgaaaatattgctcggccacaagcgaacaggcccgggcagaccctacacttggggtaacacaccgcggcaaagaaggatacgcatggacgacaacgcgattcacgagtggctgatcaaatgcttcggccccattcagggtgagatggcctggcagcagatcagccagttgcctgaggagatccgtgaacagctgatgagtcaggaccccagccgactgcccaatccatccgaagtccagcagatgatggccgcgttcagcgccggcggactcaacacgatgggcgatatgcagcgcactgtcgaggaagggccgatcaacgtcaagctcgccaagtcgattgccttgcagcaggccaacgcctccggttctgcatccagcgtgtccgccgtggatggcgaggcggctcgccgcgcgatgagtgaggcgaacctgtggctggataccgcctgcgagttcaatcccgcgcccggcgatccggatgtgctgacccgcgccggctgggtggagggcaccatcgaccagtgggcgaagttcgcagctcctgtggccgagtcgatgaacgacgctttggcttcggtgatttcggagcgtcttggcggcgcgttcggcgatggcgagattgccggcatgttcgccggaccggtgccgattccgattcccgacggtatgaaagacccagcccaactgatgaagctgctgggcaacacgtcctttgccatgcagttggggcatgcggccggcaatctgagccatgaagtgcatggcagcttcgatcagggcatcgcgttgctgaagaacccggctggtggactgattgcccagaacgccaccgaatacgcgaagatgctgaacggtgaggcttctgcggccgaggccgacacggccggcacttcaaccgactcggtcaatccgttctccacatccaccgacgcttctgccaatcccattggcttcacttcggccggcaacagcgatactccggcaactgacggtaccgcccaagtctccggctctgatgcttccgccgatgccgccgacgccgccgcgttcgaggctgcgctctccggattcgagaccaccgagaaaatccccgaatctgaagtgctttccttcctggccctgcaggaaatggctcacgcccgcctgtatgcctcggtaccgtggctgatgccgcgtttcgaggcgctcatcggcaagtacgcacgcggcatctccattgatctggatgcgatggaggaacagctgcgtgacgccacgtcaatggatccggagtcgatttccggcgcggtgaatctcaccaaggtcggcatccccgacactcccgaacagcgcgaggcgctggcttcgctggaatcgctgctggctatggtcgagggctgggtggattgcgtggtgtggcgcgccggtatggcccatctgcctcatatcgaacagttgcgtgagatgatgcgccgcgagcgcgcgatgggtggccccgccgagcgtacgttcgaaagtctgctcggtttgcagctgcgtcccaagcgcatgcgcgaggccaccgggctatgggagatgatcaccgccgccgaaggccctgaaggccgtgacgccaagtggtcgcatcccgatctgctgccttcgctgcctggcgacaagcccgcagatggcgcgtctccgtcattcgacgccccttcaggttcttcttccgatgccaacggttccgcttctcaccctgccgcagatggcaagaccggcgatatcgattgggatgccgaactgtccaagctgctcggcgaagatggcgaagacggtgaaaacggcaactcggaggatacgcaggcatagtcaaccggccttcagccaattcccgctcctgaacgacgttcaggagcattcagtatgcattacagacgcccgtcacaaaaatcgtgatgggcgtctgcgctgcactccataaccatccttggtccgtgcatacgacaaatgcagcgaatcctcagctcgggtgatgcccacatacataagccggcgttcctcttccagcgcatcccccgtttccggcgaaccatacggcaagagcccttccgaacagccgatcagaaacacgtgcttgaattccagacccttggatgcgtggatcgtggaaatcgtaaccccgggatcgtcgtttgcggcaagtccggtggcgtccaaacccatcgcctccaatagtgcgcgtttggacgcggcatcgtcggcgagcgcggatgattgccatcccgaatccttgcggacgcgatatttcagtctcgcagcgcgcaaggcggcaccgaataccggctgttgggcgttgatgcgggtgaggatcgcgcaatcggacggcttggccccgttggcaaccaaccgggctatgcgtgccgccacgccctgtgcctcttccatatcgctctcataagcggttcgggtaacgcgcgggccggattcacgggcggaaaccagtttcaggtaatcctcacggttcggcgcggccgcaagcacccggttggcgaggttcacgacttccggcgtcgaacgatagtcggtgttgagattgacatcggcggcgagcggcccgaattcatcggcgaaacgcagcagatcccagctggaggcaccggcaaacgagtagatggtctgggccggatcgcccacgacgcatacgttgcggttcattgcgctcttgccgtcaggtcctcccccgcccagccacagggtcagcagcctgtgttgcaggggcgagacgtcctgatactcgtcgacggtgagccagccgatggtggaacgaatttgggcggcggcttcgggaaaaccatccatgatatggcatacgagcagcagaatatcgtcaaaatcgatttcgccacgcgaggtcttttcctgctcgtaggcgctgtagacgtcggcgaaccgagcggtgtcgagtccggcgggcggctgcctatgggcgatggcacatgcccgggcataatcttccaccgccaccaacgagattttggcccaattgatttcggcgagcacatcgcgaacggtcagcggatcggcatcggtacgtgcggtggcgcggatgatcgcgcgggagacgacgtcacgctgatcttcgatcacatgcggaaatggagcctcgcatatgtctgcccagacgctgttgagctgatgcaatgccgctgagtggaaggtcgcggccgtgactccggcagttcccgcacccaaaccggaacgtccagtacctccccctacgccgagctggcccaatcgtgcgcgcatttccgccgccgcttttaccgaaaaggtgacggcaagcacccgctccggcttccatgccccggtggcgcaggcataggcgattcgccgcgtgaccgtgcgtgttttaccggcacctgcgccggcgataatgcgcaccggcccttgcaacgtagtcgcggcggtacgctgccgctcatcgagcccctcaagaatcccctgcgcctgttccatgcgtccattgtggcacgattcgcgctcacggcacgactcatgcctatggctgaatcggactcacgacaaaacatcgccagaatcatgcgttttgcgtgtcattctgcggtgcgaatcgccacggatgtattagtgtggaagggtgatgaaacgtagcgattatatgttggcggcactcgcctcagccgtcctgccgaatctgggggtggccggcgtacgcgagaacgtgcaggccagcgcaaccgacgaggccaaaggcatcgatcagaccgtgatccaagatgcctcaggcaagttgtacgacgtatacgccactaataccaaggaagggcgtacgcgtctgattcgccgtgtgaaagcggcgcagacactggcagccgcgcgcgagcctggtggcctcggcttcgatatggaccgtgtggtcgcgttcgccccgggagacgtttcccgacccggccagacggccaccgcacaggccgtggggcagcagacccaggcggagtccacaccgctgaccccgcgcaagcccggtcccacaggcgagacgaccgtgatgattgccgtccaccgtgatggccaggcgcggcctctcgacctgttgacattggatgactgcgcggccgtcggcaccgccatcggagccattcatcgcctgccttcgacttttctggccaatgccaaatatccggtagttaccaccggtcagattcgttcgcagctgaccgcctggattcgccgcttacgctccgccggccatgttccccaagaaatcaccgacagctgggcgcgcatcatggacaccgagggattgtggtcgttctccacctgcacggttcacggcggattttccgacggcgacttcctgttctccggttccaccatcaccacggtgaccaactggcaggatatgcaggtcaacgatccggcacgagaccttgcctggattttcggcaagctcgacgaatcccatcgcaacgccgtgctttccgcatacggccgcatgatgggctctcgacttgacgatctcatcatgctcagggccaacctgtggctgcagatggaacaggtgggcgaattcattcaggcgttgaaccgtgcggacaacgatcacatcatgcagttcaaggcacaggtcgaacgactcgcacaccagttgggcgtgatcaagcacactccggcaccggccccagccgcagggtcggccgccgcctcgtcaacgaagcccggtttgccttccacaatcaccgtcggcacattgttgcaggacgaccgtcatcaggcacccgcacaaccgcagcagtccgacaccggtaccgcggcggccgaggtctcggacgacacgcccgatcccgatcgcaccggttccgctgacatcgtggccgctggcgacgtggatcttaccccggaagtcgaacccgatgctgaccggaccgccaatcacccgcaagcgaatgtctccggcatcgcaaccggtacgggatcgaccaaaccgcagccctcacatggcgcttcccattcttcggtgacgatcacgctgaaggagctcctcagtatgaacgggcatagcggcacgacgtcaaccgacgcttcccctgcgtctcaatccgccgccccgaccgacgatgcggtgaatgacgatactccggacagtctcgttcagtacggagcctcgagtgcccaaaccacggtgattccgctgttggagcgggaagaacgcgctctgcgcgatgcccgtgccgggttggacgggtatgacagcgagggcaatccgctggccgaatcgtccacatcatccaaataatgtcgtgtacggtgttccgcgccacgccgagcgcgtaacaccgcacatgacgacgcagacacgcggcacaatagagtacagaacctcggccggcgacggccacttaccatgatgttcgtcacaaagacggcagaacaaggagccttatatggatatcgaactgggcattcagaacgtggcacgaccggtgaacttcagcaccgacgaatcagccgacaatgtgagccaggccatcgcgcaggccgtggccgacaacacgacgatcgatctgaccgatgacaagggccgtcgcatcatcgtgcccgccaaggcactcggttacgcgatcatcggctccgaaaccaagcacgccgtcggcttcggcacgctgtgaccatgaatcgcgcataagcggccttgggcattatctcaaggccgcttttgtattgctgaatcaccgatatagcggaagcacgccgcgatgaacgatctcttcgacagtggcctcgtcggtgaggttctcccccagtttgttcggtttgcctttgccatgccagtcagacccaccggtgaccagcagctggtgccggcggcagatggtgagcagccgttctcgttgctccggtgaattgccacggtgccatacctccagcccgtccagtccttcgctgatcaatgcctcgatctggtcatcggacaacagtctgcggttacggctcacatcaccggcatgggcgatcagaatcacaccgcctgctcccttgacggcggccaccacttcatgagaggtcggcgaaggcgtgggaatatagtatttggatgaggcgctgaccgcatccgcaaacgcttccgaacgagtccgatatacgccggcactcaccaaagcatcagcgatgtgaggccggccaatggtggttttgctaccctccttgacttgggcgagcacggattgccaggtaatcggataatcacgagacaacaattcgaccatgcgctgcgtgcgttgcaaccgtgcggctcgagtattggcgaacaagtccgtgatgtgctgattcgtgggatcatactggtagccgagcatgtgcacggagacgttctcatccgtggcggtgatctcggtgccgcggagcaacggcaaaccgaccctatgagccgcggcttcggcctccggccagccggcggtggtgtcatgatcggaaatggccacgcccttgagtcccaatgccttggattgttcggccaacgtggccggcgtttccgtgccatccgaaaaggcggtatggcagtggatgtcccacccgacggcgggcggttccaaaggcatcacatatccagtcataccttccatcgtaacctcatttcagcattcccacgcaaggcgcagacaggtcgtcaccttctgccaacggccgaaaccagacattcggcacccagctgacaaccgcagaggctaatctggagcgcagcgctatcgaaagggacatgatgactcgtaacaccgcaaccgacacatcatccagcaccacgaacaccacgccgcttggcttggcggaggcacgaccgttgattggatggcgccacagtgccacttggacatatctcatcatgctgattgcctcggcagtggcgttgggggcctcgctcattctgtccgctgagactttgcaattggctcggcatccggagtccgcactcggctgcgatctgaactcggtggtgtcctgttcggcggtggcccagtcctggcaagcggaaatcgtgaaattcggcgggctgagctatccgaacgcgttcttcggcatcgccgccgaatcggtgttcattaccatcgcggtgatcggtttggcgcgtgtgaaggtgccgcgttggttcgcgacctgcacgtggctgggcggactggccgctttggcttactcgtactggctgagcacgcagtcgctgttcgtgattcacgcgctgtgcccgtggtgcctgaccctgatgttctccaccaccatccagttcatggcgttgagccatgcgaccgtggccgtgcagggattgccgtcgcgtaaggctgtggcggctgatgatagcgacggtgaggctgaggtcgcggcggtgccggccggactcaataagtattaccgcctcaacatcgacctcatggtcgacatactgtggatcgtggcgatcgtggtactcatcatcgtcaccgaaggcgcggccctgttcgctgcctgattcctttacaacaaatcgatatcggcgaccagcgtggctgctccggtcagctttacgtcgctgtcggtgacgtccacgcgcagggtgccgccacgtacggtgatgtcccagtggctgatgccggtcttggcctgcagcacaatgcctgtggcgcacaggccggtgccgcaggacagggtttcgccgcagccacgttcgttgacgcgcatcgtggcttcacccacgccggtgctctgatcgatgtcgtcgacccgcacgaattccacgttctggtcggattcgatgaccggagccaccactggtttggtgaccaaatccagtgattcaaccactggcagggacgcgaaggcatcctcgatcaccgcgaccacatgcgggttgcccatatccacaaacgtaccgcgcgccgagccctcagtgccggggatggtgacctcgtaggcgtcggtttcgccgatcttccactcccccatttcgacctggaacacgttggctccgtacggcctcatattgccgcgtggcgtcagaatcttgacgccggcacgggtgccgaggcggaacggctcggtggagtcggccaccccctcacgctgagcgaacaaggtgatggcgcgtgtaccgttgccgcacatctccgccaacgatccatccgcattgcgatagtccatgaaccatttcgcgcccccggccagtacgtccgaaagctgatcatcgcttaaatcagacacgaaatcaggccgtgtcaggcgaatcaggccgtcaccgccaatgccgaagtgacggtcgcacaggaatcggacctcatcggcggtaggctcgaatttgccggacttgtcgaggtataccacgaaatcattgccggttgcgtgtgtcttggttactcgttgcggaagactcatggctttcagagtactctagggagcgaaacaacaccgcaaaacaatcggctttgtgatcggtcgcggcaacatacggttgcaggcatggctatagggaggattcaggcatgagctcttcggctccaatcggcgtattcgattcgggtcttggcggtatttccgtggctcgccaaatcgccaaggatatgccggccgagcatgtgctgtattttggtgattcggccaacgcaccgtacggcatcaagacgcctgaacaagtgagggccctgagtttcgatattgtcgaacggttcgtgcgtcaaggcgtcaaggccgtggtcatcgcatgcaacaccgccacttccgccgcggtgaacgatttgcgcgaacactacgatattccgatcatcggcatggagccggccctgaaagtggcgtgcgaccgtggtgacgtgccttccgacccgcatcatattccccagagggtgattgtggcggccactcccctgaccttgcgtgagcggaagttcgccaaactgatggatcgattcgattccaacaacacgattttcaaggagccttgccccgacttggtggagatcgtggaatccgggcggctcggcgaccatgacctggtgatgcgcacgctgcacggctacttcgaccagtacgacatggagcatatcgactcggtggtgctgggctgcacgcatttcgtgttctaccgcgactacttccgcgagctgctgcccgaacgggctgctgtcatcgacggcaatgagggtaccgtgcgccatctgggcgtggtgttggagtccctgggcaaactggcacccgaagacgcgaccggcggcgtggagctcgccaattccgatccgtccgaacggattgccgagttgtcacgcaaattgctgaacgtatgagccgttcttggctcccctctctgagggaagccaaggaagaaccagacaaattcacagcacactgcccatatcgttgtccgtgcagcacgcgtaagctcataccagattcaagtgaacagggggttggtatgacaaagacggcgatgattgatgtcggcggcgggttccgcgcgattttcggctgtggtgttatggaccgcatgctggaggacggcatcgacgtggatatgtgctacggcgtttccgccggcgcggccaatatgacctcattcatcgcacgccagcacggccgcaaccacaccttctacaccaagtacgccttccgcaaggagtacgcgagtgcggaaagcttcttcaagaaccacaactttgccaacctcgactacatctacggcacgctgagcaatcacgatggcgagaatccgttggatttcgcggcgttcgaggccaatgagaccgggttcaccgtggtggcctgcaatgccgaggacggctcgaccaagtacttcgacaaatcgcgcgtgcgttttgatgatttcgacatcatcaaggcttcgtccgccgtgccggtggcctgcgagccgtatgtggtggatggtgtgccgtatttcgatggcggcatcgccgatccggtgccggtgcagaaggcgctggaggacggctacgatcgcgtgattctgattctgtcccgcttgcgtgacgaagtgcgcaagcagcagaaggatttggctccggcccgcatcctcgaacgctcccaccccgccgcggccgagaagctgcgcatgcgctacaagacctacaacgacgaactcgaactcgccaagcattacgaggcggaaggcaaagtgctgatcctcgcacccgaagacctgtatggtctcaacaccctgaagaagaacttcgagggcctggaaatgatgtatcgcaagggatacgcggcggccgaggccattccggcattccttcaggcatagcacaagcccaaaaaacaacgattctgccatagcccattacacaatggcgcaatgacgtcagaccccgtccggcgatggcacaatcgttgtttttccgtgtcataagcccatcaaacgcggtgaagcccctcactgggagggcttcaccgatacatacgccattatgcggtctagcggccacaagcaccgctacttgccggcggcaggtgcggcgtcgttcgtctcggtcgcggtgagcatggccttggtgacctgttcgtagaggtcctggtaaccgccgggcgtggaggcgggcagcaccacggtcttggtgttcttcgattcggacaacgaacgcatcacgtcaagatactggttgaacagcaccacgttgttcacatcgttgatgtccatgcccacggcctgcagactcttgatctgatcgacgatgccattggcgatttcacggcggtagttggcctggccctcgccctgcagacgggttttctccgcgtcggcggcggcctgcgtctcgatctggatgcgctgggcttcggcacgctggcgggtggcttccttttcacgctgggcggcgttgatggagtccatcgcgttcttgacctgtgggctcgggtcgatggcggtgatcagcgtcttgaccacggtgaagccgaaacggctcatctcggcgccgacggtcttctgcacgtcgaacgccacgtcgtcctttcgggcgaaggcgtcgtccaaggtcagagcgggaatggcggagcgcaacgcatcctccatgtagctcctgagctgaccggccggatcgcgcagctcgtagtaggcggtggccacgtcgttcgggttcacgcggaactgggtggaggccacgacggtcacgaacacgttgtccaacgtcttggtttccagctgcacgttgagctggttgacgcgcatgttggtcttcatggcgatgcggtcgacgaacgggatacggacatggataccggcaaactggaccttaaggaacttgccgaagcgttcgatgatgtacgcctgctgctgcggaacgatgaacaatgcggcgcccagcagcacgataagaacgactaatagaatcagcaccaacagcatggttccgcccaacatacttgcgatggtcatataaaactcctctcacaagggtcaagcacggcatatcgttgtgccgcgccccaacaccatccatgctaccatcgcacgccccgggaactgatagctctcacaggcaagtccaagaaagcgaacgtcagatttcatgttccgttcactccggcagccacatcttgtgcactaatgtttgaatcagccaagtcgcacgtcagaaacaacaaagtcgggcatttcaaccaaggaaacacccgacttgaatcaagcactgccgccatataaacacatcagaagtgttcgttgagcttcttctcgcagtaatcctgaagccatccaagcaacgtgcagaagagcaagtagatcaagcccacttcaatgtataggaccagcggctcgtagtaaatcgccacaatgcgctgggccgtcatgaacatttccaccacggtgatgttcgccgcgagagacgtgtccttgaccaatgcgatgaaggagttgaacaatgcagggaaggcggagcggaatgcttgcggcagaataatgcggcgcataatcgtcacatacggcatgttcgccgccaagccagcttcaagctgtcccttaggcacggcaagaatcgcaccacgcaatgtttcggcggcataggcgcccacattcagcgagaacgcgattaccgcggaaggcaatgccggaatcgtaatgccaacggacggcaatccaaagaagataacgaacaactgcaccagcaacggcgtaccacgaaacacccaaatgtagaaccacgcgatttgggaggccacaggtactttagccacacgcaccagcgccaccacaatcgccagtatcaaaccgagagcgaaggaaatcagcgtcagcggaatggtcacagtgataccgggaatcagtagcttagcaaaggaatctacgactattccccatactcgtgcgtccattggtcatcctttgttgtgtggtatatgttgcgtctgctcgtaatcttcacgaggccagctcatatttcccggctcccctaattacaggagagccgggaaacatgtcactcctgagagaagtcctcgccaaagtacttttcggagatcttggtcaatgtgccatccttctgcagcttgacaatggctttgttgacttccttgaccaagtcatcgctgcccttgcggaacggcaggtaggcggccggagtcttctcggacttggcggcaatcttgatgtccgcatccggcttctgcttcaggtagtcgagcgcagcaaggccatcgttcaatgacacatctgcacgaccggacgtgatggcatcgacctgctgaccgaaatcgttaacctgaacgatagtagcgcccttctcctgagcggtcttgttccagttggaggtaccggtttcagcggcgcgaagccccttgacgtcatcgaacgaagtgacgttcttcgggttctccttggaggtaatgacgacaccgtaggagtaggtgtatggttcggagaaatcatacttggccttgcgctcgtcggtggcggaaatctgatcggcaaccgtatcgtacttcttggcatccacaccggcaagcagggagtcgaagctgccctcggcaaactcggccttgataccgacctccttggcaatggccttggccacctcgacatcgtaaccggtcagctcattggttttggagtcatggtaactgaacggagcataggtgccctcagtggcgaacacgattttgccggcctgcttgacctgctccaatgcactggagttggaagcggaagccgaaccgcatgcggcaaccgaaaccagcacggcgacaccggacagcaaagccgcagccttgcgaatcacttgattattgaacatgacaaacccctctcttgatattgtcacaattaattacaacagccgtgaaacgcctctaccgagtcaccggaatcatcagcacattgttggttgaagacaggaactcgacggtacgctcctcctgcggatgttcgaagatccgcttcggatcaccctgctcgaccacatggcctccttcgatgaacaccacatgattcgatgcctcataggcgaaccgcatctcatgggtgaccatcagcatggtcatgccttcgctaccgagttgcttgatgacccccagcaccccgttgaccatttccggatccaatgccgaagtgggctcgtcaagcaccaacagctcaggattcatagccacggcgcgggcgatgctcacacgctgctgttgcccgccggacagtgtgctcggataccgatcatgaaaatcggcaagtcccacacgatcgagttgctcaatagcgatcttgcgggcttcatcaggcttgattcccttggaatacaccaacggttcggtcacattctgcaatgccgtcttgttcaaaaacaggttgtagttctgaaacacgaacccgattttcgaacgcaccttgtgaatgtcggcagatttggtagtggtcaaatccacaagaccatcaccgaaatcgacggtaccggaatccgcgtgctcaaggaaatccagaatgcgcaacagtgtggatttaccggagcctgaggggccgatgacagtaaccacattttgtcgaggaatgtcaagatcaagcccatccagcacggtggtgtcggcaaagctcttgctcactcccctaatccgaatcatcccgatactcccttttcgctgctgttatgcacgtcaacgctcgttcgcgaagcacaatcccttaccgtagacgcgcttgctcacctgtgtttcggagtggttatatccagtgcctatggagtgctattcacaccaatgaataacacatcggacgccgacgtattgttcgctcacagatgcagcagatcgtcaaactcgtacaactcttgtctttacttgatattcagctcgttgagcttgttcttgatatccacagccgacggttcgacctggaatgtgccatcaggatagagcaccacgggaatgtgctgctggccgctgatggccaccgcacgatcggccgccccatcctcggtttcgatgttatgccacgtatattcggcgccaagctcctcaagcgtgttcttcgcctgcttgcaatcaccgcaccatgttgcgccatagacgtcaatagccatgtcctgttccttctttcgtaatacaacaacccaaattcacaacgcctcaagaataacagcgcaggtttttctcagaacgaacaattatccgcatacgtaagcgatacacgtcagtatgcgttggcaatggcttggtcaaggtccgcaatcaaatcatcgacgttttccaatccgatggaaagtctgatgagattatcgctgactccggcggcgatgcgcgcatccaaaggaacctcgcgatgcgtgatgcgcgcaggatcgacaatcagcgaacgcgcgtctccgatgttcggcacataggagaacactgtggcgccgtcgatgattcggcgcacattatcggcgctgccatccaccaggaacgacaggatctgaccgacaccgcgagggaaatacttgcctacaagctcgtattgcggcgtatatcccaatcctgaatagttgaccttcatcacatgcgctgcatgattcaaatgctctgcgatccgttgcgcggaggcaacctgctggctgacgcgctgaggcaatgtttccaaaccaatcaaggaaagatacgcattgaacgggctggccaccgcgccgaacgtgcgcagatatttgatgcggatgcgcttgatgaatgcctcgttgccgtatctttcggcaaaactgtgccattcaccgttgcgatcatcgctgatgacctgctgccgtgtggtgaattgggggaatctgccattcgcccagtcaagatgaccgccatcgataaccgcgccgccaatcgcattgccatggccggtaatacctttggtggtggaatgcacgacgatatccgcaccgaactcgataggccgcaacagatacggcgtgggcacggtgttgtctacgatcagggcgatgccgtgttcatgcgccagctgtgacagcggctcaatatcaaggatttccgtagaaggattggcaacggtctccgcgaagatcgctcgcgtatccgggcctatcttcgattccacttcagccaagtcgttgatgtgctttacgaaatcggtatggatgccgaattgtggaagaaaatcaccgagtgcatccacgcttgctccgtacaagttgctgggagcgatgattctgccgccgccttcgcccacgcacatcagcgcataactgacggccgccatacctgagccgaccgccaccgcaccgataccgccctccaatgccgcaagacgcttttcgagcacatcaaccgtggggttggccacacgtgagtattcgaatccgtcgatgagtccgcctgcgagcgcatcaccacgctgcgcattctccaaatcgaatgcggcggaggcgtagatgggcggcaccgccgcatggccatagtccgcggggtcataccccgcatgaattgcccgcgtggcaaactcacctgttccggacgtgatactcataggtgtttccagcccccaattcatgtcggtaatagtcttcgatggagcgtgttgcgagcggtcaggcaaacgcttcttccgttaattgcgcgaacacatcgcagtcggcgtgacgtttgaggtattgttcgtaggcgatgtcgaacgcctggccaagatcctcaatcaggtcggcggcatcctcaatacccaaggaaaggcgcacaagctcgtcggtgatgcccaccttgaggcgttcttcacgaggcagctcgaaatgggtcatgcggcagggcagctcggccagtgattcgacagcgccaagggagaccgccaatcggaagatgtgcaggttgttgagcacatccgcagggtccacgccaggcactacttcaaagctcagcacgccgccggcgcccttcagtcccttggcggcgagtcgctggtcaccggcccccggcaggcccgggtaatgaacggacttgaccagcggatgcgcgagcaggtaccgcgcgatggcattcgcattctcctgctgccgttccatgcgcagggccaatgtctggatgccgcggcgcaccgaatcgcattcagtgggcgccagtacccctccaagacggttctgggcgaagtacacgcgattggccaaatcctcaccggagacgaccacgagaccggcgttgacgtcggagtgaccggccaggtacttggtggcggagtggattaccacatccgcgccaagggaaaacggctgctgcaggtacggggtcacgaacgtgttgtccacgatggacagcgcaccgtaacggcgggctgttgcggagatggcgcgtacgtcgttgaccttgagcagcggattggtcagggtttcaaagtagacggcttgcgcaggcgcgatgccgttcgcgcggtcgcccttgacggcggcctccaacgctgcaatgtcctgggtattgactgactcgaccacgacgccccaacgggtaaagaactcattgagctgcgaatacgagccgccgtagatgttgtcccctacaataatacggtcgccgggcttgaaaatgctgagcacggcatgaatcgccgccaagccggaggcgaacgcaaaaccgcgcgttccctgctcaagctgggcgatctgctgttccaggaagtcacgtgtgggattgccgctgcgcgcatagtcgtaacggggcatcgcgtcgaccttctcgaaggcatatgtcgttgagttgtagatcggcgggttcacggctccggtgttgttgtctccaaccggcagtccgtggacgagctgagtattgaacctggtcattgcgcaccccctttatggtgttctctatggctgctgtgcacgaggccgttccccgtgcggcacgtctacgacgataacgtatcggacacttgaatggaacggcgttgctatatgggttgcttatggaccgttcaaatgcggtcgcggcggtcacgtggctacactgggagccatgaagattgccaaggccttgacccgtttgaccggtcctgaaaccaccccggtgttcgtgctgttgcacggctggggttccaatgaatacgatttgcccgatctgctgaactattgcggtgccggttccgccgattacgccagcctgcaggcgcccatcgcctatggcatgggatatacatggttcggtgcgtgggcgcatgaaggtgtgccggagggcgaatcattagacaagcaggcgactgaagccgcccaagccattgatgcatgggttgcggagcatattcccgccactcggccggtggttgccatgggattctcgcagggcggcctcttggccgcgcatctgctgcgtttcaatccgaagcgatatgccgcagccgtctcctgctctggatggctggcaccggggtccgttgcgggcgatgccgaattggcttcgttgaagccgccggtgttctatgggcatggtgctgcagacgacatcttcccgaaagccgatgtgacggcgatgggtgagttctggcacgagcacggcacgttgaccgaacaagtgtatccgggcatggcccattccattaatatgccggaaatgcgcgatattcaacggttcttggagaccaacggattcattcggccgcagatttggtagtcaccacctcacatggcgtagtcgacgtgggcgaattcggggactttataccatttgacggggtagccggcaccgtgggcgcagaagaccgagtcgggggtgttgtccagatctgcttcgggatcgtaagcggcggctgcgatgacctgttcggcgtcatggcatggcttgtagccgccgaaagtggcggagaaacggccatggccgtgcgtgtactggttcacatccatcgcatagtcgcgcatctcggacaccggcgcctcgccttcgatcacggcgtattcgccatcggtgaccggggattcgaaggtgccggccatgcgctggatgtcgctcatggcacggccgatcatgtctgctggcacttcgagccggaaccgataccacggttccagcagtcggcagttgccctcccctgcggtgtccggacggctctcgaccggcgtctcgggccggccactgactccagctctggcttccataagcccctgacgaatcgcacgataggtggcttggcggaagtcgccgccttcggtatgcttcagatgcgcgcggccagccaccaaagtcatcttgatatcggtgagcggcgcgccaacgagcacaccgagatgctcacgctcggtcagatgggtcagaatcagccgttgccaattgcggtccaaatcgttttcggacagggccgaggccacagtgactccgctgcccggctcccctggttccagcaggatatgtgcttcggcataatgacggagcggctcgaaatgacctgcgccttcgatcggcgcagtgatggtctcacggtacaggatggagccggggccaaacgacacatccagaccgaaccggtcgtgcagggtctgctggatgatctccagctggaccgcgcccatcaattgcacatgaatctcggccaaccgctccacccagaccacatgcaacaacgggtcttcgtcttccagctcacgcaatgcggtgatgaccttatgcaaggtcagatcatcgaactggggacgggccggcgagctattgtccgccgcggtctggccggcggtgtcgttctcctcattgcggccggttcccgacttggcggcatcatgctcggcatcgtcctgattcacgttgttatggccggcgtcaccgcgtttggccgctcccgaggtgccggccgtatcggattccgctccggcgggcaacaccgtgtaggtcaacacgggttgcagcgacggtgattcggcgtccggttccgctcccagcccttcgccggggaaggtccgcgtcagtccggtcaccgcacacaccgatccggcaggcacctcggtgaccgtctcgaatttggcgccattgtagacgcgcacctgatcgactttctcggaccataccgtgccatcatccccctgtaccggcgacggtgctgatgacgccgcagcgcacgaggatgaagagacgatctccttggctttgagcgcaccaccggtgacgcgcagccacgtcatacggttgtgctggccgtcgtgggcgattttgaacacgcgtgcggcgaaggcggccggccattcacgttcgcgggtgaacgtctccagcccgtccaggaattcctcgaccccttcgagtttcaatgccgagccgaaatatacggggaacagttcgcgtacggcgatcatcgctcgcaatctgcccacggacagcgcgccatgttccagatagtcgttcatcgcctcctcgtccagggtggcaatgtcttcggcgaacgcgtccaacggtaccgcgctgccctcagtggactgctccattgccggcagcggatatatcgcatcgctcaggcgtttgcgcaactgtgccagaatggcctcgcggtcgaatccggcggcgtcgcacttgttgacgaagatgaacgtcggcacaccgtatctggccagcagacgccatagtgtctcggtatggccttgcacgccatccgtgccggagaccacaagaatcgcgtaatcaagcacacgcagcacacgttcggtttcggctgcgaagtccacgtgccccggcgtatccagcaaggtcaggcgcaggtcgccgtgttccaccaatgcctggtgcgcgaaaatcgtgatgcctcgcgccttctccaaggaattggtgtccagaaacgcatcgccgtgatccactcgccccaatttgcggatctcaccggtacggtagagcagagcctcggacagcgtggtcttgcccgcgtccacatgcgcaacgatgcctgccactatctgtttcatcagctgtgctcccttcccgatgcgccgcgcaattgccggccgcctaaccaatatatccgagaaaatccgggagggaaaaattgtaccgacagaccgggctgccggtacaataagtcaccgaacaccgactgatatgaggagcctccgtgaccacttccggcattaccgttttcggccaaccatcccagcccaatcatggtgccggcgggcgaatcgccatggacgatgccgtcttccccaccgattatgtggcgctggatttggagaccaccggcttttacccgaacagttgcgccatcacggaaatcggtgccgtgcgcgtgcgggaggggcatatcgtcgatcaattccagcagctggtgaatcccttgcggccgattccgcgtcagatcaccacgctgaccggcatcaccgatgcgatggtggccgatctcgatccgattgacgaggtgcttccccgattcatcgcatggctcgctaccccggctgccggtcccgccgttgagccgattgtcggccataacgtcagcttcgatctgcgattcctggattacaacacccggcatatcgccggctgcggctttgcctgcgcggattatgacacgatgcagatcagccgcgccctgttccccgcgcagcggcatcaccgtctggccgacctgatcgtacgcttcggcatcgcggacaatgaggagcaccgcgcattaagcgatgccatccaaacccagcagtgcttcgaatggatgcggcattacgtcaccgagcatcacgaaaccgaagcaatccgctggaagcaggcgccggccaaaaacagcgccgaaatcctccaccagcagttggtggtaaagaggtagtttacagcccgtattccttggcgatgacggaccagaggtcggcagcggcctgatcgacggtttcgttgacgatggtgacgtcgaattcgctttcggcggcgagctccaccttggcggtctccaagcgacgggcctgctgttcggcggtttcggtgccgcggccgatcaggcggcgctcgagctcttcgaagcttggcggcgcgatgaacacgtacaccacttcgaggtcgagctcggcggcgcgctgcttgacgcggcgggcaccctgcaggtcgatttccagaatcgtgggcacaccggcggccagatgttcctccacaggcttcaacaaggtgccataatgggccatgccgtgcaccactgcagtttccaggaactcaccggccgcctcacgggccaggaactcgtcttcagtgaggaaccaatagttgacgccatcaacctcgcccgggcgcggagcgcgtgtggtggcggagacggacacccacacttcggggtggtcggcgcgcagcttggcttccacggtgcccttacctactgcggtggggccagtcaggacgattagacggccagcatgggtgttttcagtcatgggttcctccggagatgatgtggtgtgcagcgattatgaatccaacgtggtaacggctcaccggcgagatgaccggtaactgctacagccccgacgaacagggaagaatatgaatcgtgatgcgacgtacgcgatgagatagacacgtacgcatgccgcgacatctgattccgttctgattactggttttccgagccttcgacagtggcttccatcagcgcctgacgtacgtcaagcgcaatcgactcggtggcttggctcagtgcggcgatatccggcccatgcgaggcgataaagcgggacacggtgaccagcacgttgccgcgcgtaccgcggaacacggttttcagatccttggcctcggcaccctgccaaccgtaaccgggggaaagaatcggaccggtgaacttggaggggtccacgccggaatcctgcatccattggccgatggtggcaccgatgatcagacccaccgagcccatgccttcgatatccacgttatgcttctgcgcggtggaggcgatgccgtaggccacggtacgtcccttgtaatcgccgctctggcgcaacgcggtctgcagactcatgccttccgggttggaggtcagggaggcgatgaacacgccgcgtccgttttccagcgcttcggtaatcaggccgttcaacgaacgcgcgccatagtacggcagcagcgtgatggcgtcggccagcaacggtgcaccgggcttgaaataggcgtctgcgatggcggaaatcgtggtggacaggccgccgcgcaggcaatcgacgatggtgatgacgcccatttgtcgtgccgcgtagagcacgcgctcgagcgcttcgaaacctttggctccgtagcgctcgaacatcggcgtctggaatttgactgctgcggcgcgcccgttggcggcctgcagcatacgcatggagaagagttcggcgccttcggcgtcgacgttgtatccccagtcggtgaggagcttgcgatgcgggtcaatgcccacacacagcggcccgtatttggccattgaattgcttaatcgcagaccgaaatccgaacgttgtgcctgcaattcctcactgctgagtgtagtcatcagaactcccgtcgctccaattcgaacagctgcttcgaatgctcctgaatgctcatgatctgataatcattatgcttcacggcctcgatagcgagcagcgcggcctggaactcggtgatggtggtgaactgcggcagatcggcggcaatggcggcggcacggatggagtagccgtcggaacgggagccgcgcgagttcggcgtgttgaggatcatgtcaatcttgccttcctcgataagctgaaccacgttcttgcccacggatccggcagcgtgatgcacctcgaccggggcttccggatcggtatccacgcgggtgctgatcttgtccacgatgttcgactcgatgccgtaacggcgaagcacggaggcggtgccctcggtggcccagagcttgaatccaagctcctcgagacgaacggcgatcaacggcagctgacgcttgtcggtgtcgttcacggagatgaacacgttgccgtgggtcggcaggccaccgtcgtaggcggcgagctggctcttggcgaaggcgtgtgggaagtcacggtcgaagcccatgacctcaccggtggaacgcatctcaggtccgagcaggatgtcgacggtcttgcccaccggggtgcggaagcgcttgaacggcagcacggattccttaaccgcgacctgctggccggggtggatgtcgccgccgtcgcccttgggcagcagcagaccgttggcacgctgatcggcgatggtttcgccggccatgatgcgggcagcagccttggccagtgccacgccggtggccttggaggcgaatggcacggtacgggaggcgcgcgggttggcttcgatcacgtacagcgtgttggccatgaaggcgtactgcacgttgatcaggccctgcacatggcagcccttggcgatggcgtaggtgccttcacgcaggcgacgaatctggtcgtcggacagggtggacggaggcagggtgcaggcggcgtcaccggagtggacaccggcctcctcgacgtgctccataatgccgccgatgtatagttcctcgccgtcgaacagtgcgtcgacatcgatttcgatggcgtcttgcaggaacttgtcgatgagcagcggggagggcaggcggccggagaccacggtatcggccttggcctcggcaagtgcgcggtccacgtacttgttgagctgcttgtcgtcgtagacgatttccatgccacggccgccgagcacgtagctcgggcgcacgagcaccgggtaaccgatgcggtgggcggcttccttggcctcttcgaggctcagggcggtgccgtaacgcggggcgttcatctccgccttcttgagcacttcgccgaacagctcacggttctcggccaagtcgatggattccggggtggtgccgagaatcggcacgccggcggccttcagacgcgcggccaaggacagcggggtctggccgccgagctggacgatgacgcccttgaccgggcccatcttcttctcggcctcgtagatctcgagcacgtcctcgaaggtgagcggctcgaagtagaggcggtcggacatgtcgtaatcggtggacacggtctccgggttgcagttgaccatgatggtgtcatagtccttgccaagctcctgcacggcgtgcacgcacgtgtagtcgaactcgatgccctgaccgatgcggttcgggccggagccgaggatgatcacagcctcgcgttcgcgcgggcgcagctcggtttcgtcggcgtagcagctgtagtagtacggcgtggcggcgtcgaactcggcggcgcaggtgtcgacggtcttgtagaccgggcgcagaccgtaggtccagcgcagttcgcggatggtgttctcgccttcatcgcccaaaccacgcaggtgggccacctgcacgtcggacagaccggcgagcttggccttcttgagcagcttcggggtgagggtttcagcctcgcgcaccgtcatggcggtctcattgatgaggaagatctgcttcaggaaccacgggtcgatcttggtggccgcgaacacctgctccagcgtggcgccgccccagatggcgcgcatgagctgcaggtaacggtgttcggtcggggtgtggatggtctcaagcagttcggccacttcttcggcggacggcttctcgccatcccaattgaagcccatgtggcgcttgtcgatggagcgcatggccttgccgagggactcctggaagttgccggccagggccatggcctcgcccacggacttcatggaggtggtcagggtggggtcggcgcccgggaacttctcgaaagcgaagcgcggcaccttggtgaccacgtagtcgatggtcggctcgaaggaggccggcgtggactgggtgatgtcgttgcgaatctcgtcgagcgtgtagccgagagccagcttggtggcgatcttggcgatcgggaagccggtggccttggaggccagtgcggaggaacgggagacgcgcgggttcatctcgatgacgatgatgcggccggtgtccggatgaacggcgaactggatgttgcagccgccggtgtccacgcccacgccacggatgatggcgatgccgatgtcacgcagcttctggtattcgcggtcggtcagggtgaagcagggggccacggtgatggagtcaccggtgtgcacgccgaccgggtcgacgttctcgatcgggcagacgaccacgacgttgtcgttgcggtcgcgcatgagctcgagctcgaattccttccagccctcgatgccctcttcgatcaggacttcgtcggtgggcgagtaatggatgccggcgccggcgatgcggtgcagctcctcctcgttgtgggcgatgccggagcccaggccacccatggtgaagctcgggcgcacgaccagcgggtagccgaacttctcggcgatcttgtcgacttcctcgatgctgtgggcgatgtcggagcgggcggattcggcgccggcctcgtcaacgaccttcttgaacagttcacggtcctcgccacggtcgatggcttccagggaagcaccgatcagttcgacgttgtacttcttcaggacgccggcctcgcccagcgccatggcggcgttgagcgcggtctggccgcccaaggtgggcaggagcgcgtcggggcgttccttggcgatgatctgctcgaggatcggggtggcgatcggctcgatgtaggtggcgtcagccatctccgggtcggtcatgatggtggccgggttggagttgacgaggatgacgcggatgccttcctcacgaaggacgcggcatgcctgggtgcccgagtaatcgaactccgcagcctgaccgatcacgatcgggccggagccgatgaccatcacggatttgatgtcggtgcgcttcggcatatcacttaccttccttggagttgttcttcataagttcgcagaaacggtcgaacaggtaggccgcatcgtgcgggcctgctgcggcctccgggtggtactgcacggagaatgcggggatgtccacgcactgcaggccttcgaccacgtcgtcgttcagatcgatgtgggagacgaacaccttgccgtacttgccgttttcaaacggcgcgtcgacctgcttgccgatcggggcgtcgaccgcgaagccgtggttgtgggcggtgacctcgaccttgccggtggtcagatccttgaccggctggttgatgccgcggtggccgaacttgagcttgtaggtgccgaagccgagtgcgcggccgagcagctggttgccaaagcagatgccgaagaacgggtagccggcgtcaagtacctggcgcagcagctcgatttcgggaccggcctgttccgggtcgcccggaccgttggagaagaagacgccgtccgggttcaggttctcgatttcggcgaaggtgatggtggagggcaccacgtgcacgcggcagccgcgttcggccatgcggtgcggggtcatgcccttgataccgaggtccacagcggccacggtgtacagcggctccttgccttcgtactcgccgcacggttcgatggtgtaggtctccttggtggacacctcgtcgtacaggctcagaccctgcatctgcggggtgttcttgacgtcttcgagcagctgctcgatggtcttgagcgcgccggtggcctgatcggtcagggcgtcgccggagaagatgccggcgcgcatcacgcctgcggaacgcaggtggcgcaccagcttgcgggtgtcgatgtggctcaggccgacgatgccgttcttggcgaggtcgtcgtccaggctgccttcggcacgccagttgctcacgttcggagagggatcacgcacaatgtatccggcaacccagatgcgggaggactcagggtcttcgctgttgacgccggtatcgccgatgtgcgggaacgtctgcacaacgatctggcgatcgtagctcggatcggtgagcgtctcctggtatccggtcataccggtggcgaagacgatctcaccggtcgtctcgccgagggcgccgtatggctcccccacatatacctgtccgtcttccaaaacgaggactgcatcgtccttgtcatacatcggaattgcgatggtcccggactcgttctggctcaccaaaacccccttatgtttttcgggtattcgtaccaaggttaacggccagcgcagactcacacgccgttggacgcaaagtctcacccccgctggcggggctgtcggcaaggtgccgacttgagaatgtacggcggcacaagtgtccgcccatgaaaaagcctcccgaatggggaggctgaacaacaaatgactaatcgaccgtcggctgaatctcagcggacggggcagcaggctcgtcggatgcaccggacgaatcgggcgaatcggaaacatcgccctcatcggtcggctcggatgcggcggcagcggaatcggacgattcctcatcggcctcttctgccacggactccggtgccggtgctgcattcttggcggtgcacaccgcagacagcaggccatggatgaaagcgggcgaatcgtcatcgcacagggtcttggccaatgccagagcctcgtcgatggcgaccttgtccggcacatcatcggtgaacagaatctcccaagcggcgatacgcagaatgttgcgatcgaccacgcccatacggcggaccttccaacccgtggagtgttcgtccagggtcatgtcgatctgacgacggtgctcggccacgcccttgacgatttcaatggcatagtcgggaagcggggtctgggcaccgggatgtgcgatgcgctcgtcaagcagggagagaatatcctggcttttttcgtcggcttcgtacagggtgttcagagcccttttgcgcgcggtggaacgtgccatactgctgctgtcctagtcctttatacggtcggtcgtctgttgaggatgcggagatcagttgttctcgcggccggtgtaggaaccgtcctcggtgttgatcttgacgcggtcgccctcattgatgaacagcgggacctgaatctcggctccggtctcaacggtggccggcttggtgccggcgttggagcggttgccctgcaggcccggctcggtgtgggtgatggtcaggaccacggagcccggcagatcgacgctcagcggggtgccgtcgtggaaggagaccaggcagtcggtgccttcgagcaggaacttggccttgtcgcccagaagggtcttcggaaccatgatctgatcgtaggtggtcatgtccatgaacacgaagttgtcaccgtcctcgtaggagtactggagagtgcggttgtccacggtctcgaattccatcttcatgcccgcgttgaaggtcttgtcgacgatcttgccggagagcacgttcttgatggtggtgcgcacgaaggcggggcccttgcccggcttgacgtgctggaacttcatgacggtccacagctgcccgtcgaggttcaggacggatccgttcttgatgtcgttagtagtctgtgccacgttattcacctatttcaaattcaaactagcttaggcaaagcccaaaaattgcctcggctattatgccacaccgggtatacaggaagtgaacgctggggtttcccatgtgcccccggctagactggatgaatatgcgatccttcttcgaagccatatccgtgtcctgcgtcatccccgcgcaatcgccggcggacgacgaacgcacggtgttcgagaacctgtcctttgctgtggagcgcggcgagatcgtcgatctggtgggaccgtccggctccggcaagtcgagtctgttgaccgcgtgcgcccggctcaacccgcatgcgcacggcgcgttcgcccttgaaggcaagggcagcggcgagttcacgccgcagcagtggcggcgggatgtcgcctacctgccgcagaagccgattctgacgggcaagaacgtggccgaggcgatccgcctgccctggacgctcgcgattcgcggcaagggcggcaaggccgagcagctgctgcccgacgagcgcatccgcacgacgttggacgcgatgggctgcgaggacatcgatctggagcgcgccccgcacgacctgtccggcgggcagacggcccgcgtggccctggcccgcacactgctcaccgacccgaaggtgctgctggccgacgaggtagatgccggtctcgacgacgacaacgcagccaaggtggctacgatcatggcggatgccgccacacgcggcatggcgatcatccgcatccgccaccgtccgccggacggacgggccacccgcacgctgacgctggacaaggggcggctgaccgaacgcgagatgacggattcggcggcgcaggacgcgaacgcggtgcctgacggcgccgatgaaaatgaggagacgcaggcatgagcggcgatctgggcaattcctacaacatcgatatctggggtctgctcatcgcgctgggcatggtggccgtggcggccatcatcagcgaactgatgcacatgggcatcggcaagaccctgatgtggtcgtcgtgccgcgcattggtgcagctgtgcgccatgggcttcatcatcggctacgtgatccggtcgaacaacgtgtggatggtgttctccctgatggcggtcatgctggtggcggccgtgcagatcgtgatgtcccgcgcacgcggcatccccaagggccttgccgggccgatcttcctgagcctggtcatcaccatgctgctgatgctggcgctggtcaccgagctcatcgtgcgcccgcacccgtggtacgcgccccagctggtggtgcccctgaccggcatgctgctgggcaacaccgtaaccgccttggcggtgggattgagccgtttctacgagagcatggaggagcggcgtgacgaggtggatatgatgctggcgctgggagcgaccccgtgggagtcggcccgcccgtccatcgtctcgtcgattcgcttgggcctgctgcccaccaccgcctcgctggcgtccagcggcatcgtgacgatcccgggcatgatggccggtcaggtgatcgccggcggcgacccgctcaacgccgccaagtaccagttcgtggtcctcgacgccatcgccgcgctgaccctgctggccgacggcctgatcatggtcatgatctaccgcacctgcttcaccgccgacgaccaataccgcccgcccgaagcgcgctaatcagctaagctccctctgataagctccctctgacgagggagctgtcgaacgcaacgagactgagcgagagaccaccctacgcgatggtgaccagcgtgccgtccggcacctggtcatagaaccattgcgcgtcggccacagtcaggcgcacgcagccgtgcgaggcgggctggccgagtttggcaccctcctccggcagatagtcgccgaaggcctcgccggtcggcaccgagtggaacaggtacgaaccgtagaactgcacccaatagtcggcgcccatgccttcttcggcattgtagaagtgttcaccgcgcgtatcgatggtgtacgagccgtgcggggtggcgtcgtcgacgccggtactggcgatcatcgtataaatggtctggccaccggacttgacgtacacccgttgtttggcgagactgacctccacgctcaggtcggagtactgggataggtcgggctgtttgccggtcggtcccttccagtccacgctttgcgcggctttgtcatcgccgttctgcgtgttctgcgtcttccgcgacccgccctgtttgccgctatcgggaacctgcttgcgggtaacggccgtgggctcgttcgccgctgcggttgcggcggcggttgcggtgtcggctcgcggccagctgcgctgcgccgccgcggtctcgactccggcgccgatcaggcagaacaggatacagcaggcgaccactccgcgccgaatcacgtagacccgatcgcgactccaattcacgttcaacgtcggcagcctcaccatatgcctcttctcaccacaaagaccattcgggtcgattgtaaacaggcattgcgacgccctacgcctcggtttcagccgtgatctcgactgcaggaacggcatcgtccggggaatcttcgcccgacgccggcaccatccagcgccgccgcagcagcatccacaggccgatgaagcacaggagcccaccggtacggtggtagacactcatctcctgagtgagtcgctgcacgcggtcggcaatctggcgcgtacgggtatgcgatttgacgatggagaaacgtgagacgcacagcatcgcgtagtacacggcgctcacgatgaacagcacggacatcgtccacaatcccatcgccagtttgacgatggccataatgccgccgagcgttgtggagaaggcgacggccagtgcgactttgtcgttgttttccatggcgcccaggatgttcagcgtggtggatttgccggcgccggatgcgccgaggagactgcctggccattcctgcaaccggtcctgttccccggcgagccggatatcgactccatcgccgatccggccgaacgcaaacgccgcatccttctgaagcagttctacgtttccggcatcatcggcacattccgtgcagcgctaagcggctcgatcatgaccacccccaccgagatcgggcactttgtctccgaagaactgctcccccgcatcgcgccgcatatgcaaatgccatcgcaatcggaaacagcgcagcagccagcggcatcaccgcaagcccagtagcgaggtcaacccacagctggcggcgcgggaaacaggtcgcgccgcccagtacgcgaatccggcgagcttctaccgagtcgcgaggaagaagaaacgtgggaaggggaagatgatgctgccgtccgactgtgtggggtattcctcgcggacttgggcgaacacttcggcctcgaacttcttgcgcccggcgtcgtcaagcgcttgcagatacggcctcatgccggtgccacgataccagtccataatcgcctcatgcgagggcagcgtgtgcatgtacgtgaccttccacatgcggaaggcgctggcatgcgcatgcagcagctcccagtattcgggcggcgtgaggttgtagaactcgcgttgctgcggcagcttgtccgcgaacgcgggcgagtgcacgataccaccgatgatgcggtgaatcggctcctcatagttcatcggcgtctgcacagccagcactcccccgaccctgagccgggcgagcagtccgggaatcagatgcggatggtccggcacccattggatgcaggcattggagaagaccacgtcgaagtcggccggcagctcgtccagccgcgcggacacgtcgcacagctggaaatcgatgtcgggataggttttgcgcgctgtctcgatcatgaccggcgagctgtcgacgccgagaatcttggcatggggatagcgctcgcgcagcacggccgtgctgttgcccggcccgcagccaatatccagcacgcgcgtgacgctgccgtcgtccggcggcagctgcatcgccagatcacgcgccggctgcgtgcgctcccgtttgaatcgcagatactgttccgaatcccaggtaaccatgctccccacgctaatcagccattcacatatcggccgatattatctcacaattcagccgagcagggcgtcgcggcgggcgatgagcccgtcaatcgcggcctcgccttcgatgacggtgaaggtcagggacttgcgttcgctggcctgcggggcgatggcgtgcaggtcgccgcgctgctcgtgccagcctcggccgtggacgctggagttcgagggttcgaggccgaccacgtagtcgcccgcacccgtcgacttccattccatgaagtatgggaagaggctggcgtcgaagtcgatgacgactccgagtccgagcttgcggttgaccacggcggcgaagctgcggccgttctcgtcggcggcgagctcgtgcaggtacacgctttcgggactgatcgtcgcggaaggattcgttggtcacctcatcctcgaccgtgatcgacagccggccgtacacgctggtgattgtgcgacgcagtacgaggttctcgccgcggtattcgaactggcagacgtcgagggcgcggtcggccatggacacgaaacgcaacggaccgttcttcacctcgatggccttgaggccgtgggctcggccttcctagtattcgatcgggcgcacgtaggcggcctgctgaaggctgcccatatgggccagcatgtcggctcgcgtgctgtgttctgtggacgtcatcgtcgtcaccgatccttgatatttatgcctcacgcctgcgcagcggcggcatccgcggcgtcgttcttcagcgcgcgcagcagggccttgttgcgggattcgatgatgcgcttgccgtcctcgccctgccaggagaagaagccctggccggttttggcgccgagattgccttccctgaccttctcggcgagcagcgggctcgggccggtgccgttgtccatatcgtcgaacaggtaagtgctgatgttatagaacacatcgaggccgccgaggtcgatgctggcgagggggccgaccagattccagcgacggccgagactgtacttcatcacgtcgtccacggtggccgcgtccgcgatgccctgctggacgatgtagaacgcctcgcgcagcacggccagttgcaggcggttgcccacaaagcccagcgattccttcttgatcttcgccggcttcttgccgatcttggccatgaggtcgaaggtgatgtccaccaccttcggatcggtcttctcacccggcaccacttcgaccagcggcatcaactgcgcggggttccagaagtgcgccaccacgaagcgttcgggcttcttcagcaccgactgcagcgcggtggggctcaggccggaggtgttcgtggacagaatcgcgtccttgggggcggcgtgctccacttcggcccagacggacttcttgatgtcaaggttctcggccacggattcgatgacgaagtccacgtccgccacgccgcttgcatagtcggcgtaaccggtgatgcgggccagcaccgcgtccaaggtgtcgccgtccttgagtagtccggcttcggcgaagtcctcggcatccgaacgaatcgccttcatcgccttctccagcgaggcctcgccgcggccgaccagatgcaccggatatccggccaacgcgaactgcaacgtgatcgcgtggcccatggttcccgtgccgacgttcgcaatcgtcttgatatcgtccactgtctcaatcacggagaccccttctttccggcggttcgtctggcgttggtgtacgcatgaacagcaccgtgccgttatgcgtttgttcgcattctatgccgatttcgctacgtgaacatttgctgaacatttcgcggattcgactagtacaaatccccatatcagcacaaaagcgtggtgccgcaacaccgaagtgttccagcaccacgctgaaatgttcatgtcgttacgctgccgtcgcgcacccacagcggaatcgataggaaacctcaccggagtaggtgaacacgggggcgaccagcatggacggaccgaacatatactgacggtccagcgtgcggcatgccgggtcatcggggaactccacgaacatggaacgcatgaccggagtaccgttcacatgaggctgcaggccaagctggtagacatacggcatgagttcaagcttgaacttggtgaactcgcgcaccacatccacggcggtctggccgggcaccaatgcgacgccgttcttctcgtcctcctcgtcgaacagccacggcacacggtacacggtggaaccgtgcagtcgcgagtgggagccgagcatgccgaacgccacccaacgcttgtagacggccggatccgggaacgcaccttcgaagccaccgatgccgtgactccagaagccgaagccggaggaggtcagcgacaggccggcacgcaaggactgggccatgccattgaaggtggactcgcagtcaccgccccaatgcacgggctgctgctggccgccgacggtggcggagcgcgcatacaggcaggcgttgcccttgccgtaggtttcttcgatggcttcgaacacggcctggttgtacagctgggtgtaccagttgtgcatggagagcttcggagagccgtcataccagacgacgtcgcgcgggatacgctcgccgaaatcggtcttgatggcgtccacgccctgattcagcaacgccttgaccttgtccttgaaccattcacgggcggccgggttggtgaagtccaccaagcccatgccggcctgccagaagtcggtctgccagacttcgccattgggcttgcgcaccagatagcccttgtctcggccctccttgaacatttcgccgcgctggccgatatacgggttgatccaagcgcagatgtgcaggcccttgtcctcgtgcaggcgcttcagcgtggattcgatgtcgccgaagaaacgcttgtcccactcgaaatcgcaccaatggaactcgcgcatccagtagcagtcgtagtggaaggcggccagcggaatatcacgctcggccataccgtcgatgaaggagttgatggtggcctcggtgttctcggaaccgatctcaaaggagacatggccgcggttgttgaccagtacgccatacccattggaggtcatgtagaacgggatgtccttgtagccctgctcggaagcagtgccgccatcctcattccagatgtcgacgctctgaccattcttcacgtaagcaccgaagcgttcgcccaagccgtatacgtcttcgccaaccgacagatgcagctggatggcaatgaacacgtcggattcatcacgggcggaaccgtccatggtcacaccgaattcgctgaccggctgggcggtgacgttcgattcggcaccgagcttgaatcggcccagcgacttgcctgcggactcagtgagcaccttgccgtcctcgccgatgaaggtcaggttccagggggcgcccttgacgaccttcacggtaagtccgccagtggtcagcgtgacatccgcgccattgacgccgacttcgccgtcgccattgccgttcgcctgaacggtcacgtaatcacggttgccgggttcgtcggcattgagcgggaatccggggtattcggtggcgccttgccagtgttcggcacacacacgaatcacgccttccgcaggtgtggtgatgtccacattgaatgtgggcaggttcagggtatcgtatcggccgcgcaccacggaggtcggggcgaggacgttgaggctttcggtggtggcatccgccgccagttcgtaggcttcacgagcgtagagggcgtcgacgccgtcacgaatcatccagtagccgttggtgaacttcattgttgctgctccttggtggagaggtggtttcgaccgccagggaacaaggcagccgaaaccaaaatcaatatgtgctgcttgttgattgaattgcctgttgtgcgaatgaccttacttcaccgcgccggtggtgatgccgtaccagtcgccggagcccatcatgccttgctcatcgtacttgccggtgtcggccaaggaaccggtgataatcttgtcccagccatattcggacacgtaatcgttgaggttggtgagcaggccttggctggcgagcaggccggacgtggcgttgcccttgttgtattccgtaacgtccggagcgtcgtcggagttgaggacctgggaggcgttctggcgaatctgttcgaaggccttcttctcgaattcgaccttgacgccggtctcacacattttcatgctttatgcaaaaaatgtgaggcatacgcacatttcccatcaaacgcacaggtgcaagaatggcagcaattcgccatttttgaaatcaccatgtgcgtttgacggcgcgtaagcctcacattgttctcagcaggaccgaatttctgcgagcccccctatagcgctcccctacgcaatatgtccgcaaacgaccacaccacatgggcgatacgcgccaattcggcgtaacggccgatggacagccactgcacacggtaccgttcgaaccacaactccaaatcggcggcaagacgggcgcggcgcgaggcatccagcgcacggccggtcacatccttggtgtcacaggcgtcctcgccgccagccaataccagcagttcctcacccagtctattgaacaaccgctgcccatccagcatcacccacagcagctccgggttcaatcctcctcgtgccgagccatcgagcaccgcgacaaccgcactgccgcaatcaatcaacgcccggtcgcaatcccggcgtcgttcgagacgggcatggttccgcaggagcaatcggcggcgcgcgtcggcgcatcccagcgcacggtcaaacatgagctctcccccgcacgaccgttccacatatgatgccacatccgtattcagcatgccggtgccggaaccgtattccagttccagcacttgcacggcgaggtcccaggggaacgacactccatcggagtcgatgcgagcgagtgaatccataagccaaccggattcgtcgccatacgccagattagaaatccgatggttcatttcgcatgcgtcaattgcaaccgggttccacgcgttttgcgcaccgtagcacagtcccggcacgctcaaccgcggatcattgacatgcccatagtcaccccaatcggtgaccaccatgccttccgcaccatatttgagcccagccaccgccatgcggtacgtgttcagccaggcaccgtcatagtcggggaagaaccggctccacgcacgcacggcagggcacacgaattggcggcggccttgtgatgcgatggtctggatcttgctttcgtcgatatccggctcatacatccagttgagcatcgtgatgtcgccgggcagcaagtccatggtgtgcggattctcgagcgcgatatccgcccacagcatcggttgtagaccacgatgggcaagcgtgctgcataggtctttgacgaaatcggcatacagctcatcgcgactggcgcccggcgagtcctgtacggaccggccacggcccaagtcgaaagtctcatcgccaccaatattgaaggaccgcgagcggaacagcggcgcgtattcctcgattaggcgcgaggcgaaatcgtgcgacttggggttggctgcgttcagtgtgtggtgttccattcgttcgatgaaactgaacggacggtcggcgtcttcggggaactctcccagtccacgatgttcacgggtgcgcaggttcatatacatgtgcccgaaagtggccaaggacggcaccagttcgatgccgtggtgtgcgcagtattcgtccaggaacatgatgtcgtcggccgtgagcgggtcagtgccgcgccacgcttcgctgagctcgccgaaagcgaaggcatgttccacgtacagctggaattggttgtacttatacaacgccagctggtcgatgaaccaggtgaggaacgccatcgtcggcacacgcccgcgcgtcacgtcaagactgtaggcgcgcaccgcgaacgcaggcttgtcttggatatgcaggcagggcaaggtccgcgaggtttgcctgatcatctgccgcagtgtctgcatgccgtaccgcaatccgctttcgctgccaccacgcacggcgatggtatctgaggcgaacacatccagcgtgtattcgtcatgcgccaatcgcgcatccacacacagcaatatgacggtgccgttcatcgctgccggcgcacccgcgcccgcacccgcacccacgcccgcatctcgcgctttttcggcggcattggcaccggcgtcggcttcatctgtggctgtgagtactcggcgcgtacggacggcgacgccgcagtaacgctcgagttcgctggacagctgctcgattggcagcgtttcccaggtctcatcggcaccttcggtgacggcatattcgggaattcgtttctcgatcgtcaccaaggacccgatcatagccgtgccatgcgtgtattccaatgtcaccggagcgggaatcagggtgagacacggcgttgcggcatcagccttatattcgaatgtgggcacagctgttcctttcatactgtttttattatcgttcatccgctgacggcaggcgacacgcggtcacgccgccatcagcggacgaatcgtttggtgaggtacggcggcatacgctatttcacggcaccggtcgtcacacccttcatgatgttgcgctggatgagcatgaagaacaccaccaccggcaacgagaaggtcaccgaagcggccatctgcccgccgaaatcggtgcccatggtgggtgccgagaaggacgacagccataccggcagcgtgtacttcgactggtccttcatgaacgtataggcgatcatgtagtcgttccaggcgttgatgaacgcgaacaccgaggtcgagacgatgccgggcgcggccagcgggaaggtgatcttccacaggatctgccagtcgttcgcgccttccacggccgcggattcgaagatgtccttcgggatgttcaggaagaacccgcgcatgttccagatcgcgaacggcagcaccatggcgatgtacgccaggatcaggccgctgtatttgttgagcaggccgagctggttgtagatgatgatctgcgggatgatgccgccagaggtcatctggatggccagcacgaacaccatgatcggcttgcgcccgcggaagcggtacagggtcagggccgtgcacgcgaagaacgcgacaataatcgacaggacgatcgagaggtgcatgggccagaacacgggggtcgtggtcatgatctcatcgcgcggctttacggcggtgataatcatccagtagaccgggaagaaccatacgacgcagaacagcagggcgaggatagtggtgccggcgcggcgcgcgatcttgccggggttggttcggcggcggggcggtgcagactgcgctgcgccatgcgatacggcccgtggattctcaacacatttcataaggacgacccgctatttcagggattcgccaatatcagcgtgccagtcgccatttccggcgtcggctatggcagcgccaccccttccccaccgtcgacatcgacaaccgactcgcttcacgcaagctcaccgagcatatgttggggcgcgggtatcgacgaatcgcctatatcatcggaccgtcgtacttgccgacgtcgacgccgacgccagcgtgcccgcagctgaccaccgaggtcgtagccagataggcgcgcagagaacggttctcaataatgtctgtgcacacttctctacgcccgaagcacacatggaatatgccctaatcactgccatgtcgccatttgcgatgatgtgagattgttatgttcttgttcatttgagcgcacagatactactgagaaccgttctctgcgcaaatagacaatgtggataactccataagctggaaccacattgccctgcctggcttgcattcaagtccaaatcagctttacggtcgcaccatgagctcttttatgcatgaggatattgtcggccgacgccgagcagaacgtgaacgctgcaatgatgctgcgcgccgttcgaaaggtccattgctggtgggatacatcaatgcggccaactactacggcgcgcccatcccccgacattgcacgctatctgttgatgccgtgcacgcctgtgtttccagtgccaacaaacgcagacgaatcaaaggcgtggtcttccatgtgtttaagggaaaactggatatccgcaaaaaggattatgaacagttctggattgcctcgccggtcatgatgtgggctcagatggcccaatactctacattggaggaacttgcggccattggagcctctttgatgagccgcgataaacggcgcagaatggccactcgcaaggatttcgatacttacttggaaatcagtccgcggttcataggtcgtaacaaatgccacgaggcactgccctacatgacagagaacacggattctccgccggaaaacacgctgtttgggatgctgaaggattcaggcttgggatgccccaccgccaactatcgcgtgaatatcggcaactcatacgtcatattggatatggcatatccggactgccgcgtcgcgttcgaatatcagggagcctatcacgccgatccggcacaaatgcgaatcgacgcggcaaagcgaaacgcattgcaactgctcggctggatcgtcattctcgtcactgcggatgacctgagaacagccgacacgcggcatcgttttatcgagatggcccatgtcgtggtgtcccggcaacgcaatctcgccgattggaaccgctcatgggccattacctcttagcatcgcaccgacaatgcgctatgccgttatttactgcgagacacccgccagatatcgggctcaacgtagatctcccattcataccaaggcagcgcggcacggcgtcctcgtccatgtgaatggcctgcaggttaatgagcctatccacgccgacagtgcgctccattgcctcgaccaccaggtcgcgggtgctgtggtcaagcgattcgcccaccagcagcgaaccggacttaaacgccaacgccgcctacaaaagtgtgaggctgcgcaggctcacactgccaacagccgttcagccaaccctcggaaggtctggccaatgccatccgtacgcaaagcgccgtcggcgtccagcaccgccggccggccggcctcgccggtctcgcgcacttcgggttccagcggcagctgggccatcagcggcacgtcatagcccagcgcctgagtgagctgttcagacacgcgctgaccgccgccggcaccgaaaatctccagcttctcgcccttgtgctcgtagtagctcatgttctccaccacgccacgcaccttcatcggcacctgcagggccacgagtccggagcgcacggcgatgtcagaagcggagggctgcggggtggtgaccaccacgagttcggcgttgggcagcgcctgggccacggaaatcgccatgtcgccggtgccgggagccaagtcgagcaagaggacgtccggctcgccccaccatacgtcagacaggaactgttccaaggagcgctgcagtcgcggcccacgccacagaatcgcccggtcagcaccggcgaacatgccgatggagatcagtttcacgccccacgcggtgaccggcatgagcatgccattcagattggtgggctgtgtatgcacgccgaacaggcgcggcagtgagaagccataaatgtccgcgtcgatggcggccgtgtcgaagccgagggccgcaaacgtggcggccaggttcgcggtaaccgaggacttgccgacgccgcccttaccggaggcgatggcgaagatgcgggtcttgacacccggtttgctgaaggggttctgcttgcgttcggccttgaggtcggcgaccagatcggccagcttgtcacggctcatcgaaccgacttcgatatgaggcagcagctgtgcgcccggataggagctgaccgcgccattgatctggctggtgatggtctcgctcagtgggcatccgggaaccgtcagctcaacgtgcacggtgacgtcgtaagtgccggcgtccgacgatgcgggcgcggcttcgatggcggcaatcatgccgaggtcggtgaccgaacgaccgagctcggggtcgatgaccttgctcaggcgttcgtagatgtcggcttcgatctgacgtgcgtcgctcataaatccgtatcctcctttagggcctgttctaccctagcgtgtgatgcggcggcatgccagagggagtggagtaagtcacactggggcgggattcgctttttctctcccccagtcagcctaaaggctgacagccccctcatcagagggggttaattgaaccgcaccccgattgttggactggagtaattcatgtccgatgatttggaggtgcggttttctatgtcacggaaacgcaggggttcatacgatgtcgagtatatgagaatcgtcgtcgggttgattcgcgatgggatcggcgccaagtcgctcgcccgccggcttggcgtgtccaaggaaaccacgagagaatggttgctgtcataccgaatcggcggagaggcggcgctcatgggcgaacgcgagggcaacaggaaatacgattacgagacgaagctcgccgctgtgctcgaccatctggaacgtgggatgagcaggccggaggtcatggaacgttatggcatcgccagccggacgtgtctgaaacagtggtgccaggactatcgtcgcggagggccggaggcgctgcgcccgaagcccaagggcaggccgaagggcgcgaaatccaaaccgaaaccggctcccacgcgcgaacagctcctcgaggaggagaacgcgtatctcaaggcgagggtcgcgtatctggaaaaagcccgcgccctgctggcgtcgaagccgacaaccgggagaagtcggtgatcgtctcgacgctggcggggctcggccatccgctccggtgcctgttgaaaatcgcgggattggcgagaagcacctactactatctcctttcgcatcccgagccggtcacccggccggatatcgagccgatggtcgctgaggtcttccatcgcacgcccaacgggtgcggccaccggcaggtgcgcatgtgcctcgtatacgagttcggcgtgcgcgtgagccataagagcgtgctcagggttatgcgccgcatgggattgaagtgcgccatacgccgcccgaacccataccgcagatacagctcataccaaggcgatacgggcgcgaagccgccgaacctgctggaacgagacttcgcggccgaccggccgtgggtgaagctgggcacggacgtcaccgagttcagggcagcgggcggcaaggcgtacctcgcgcccatatacgacatgggatccaaggagatcgtggcctgggacgtcagccggcaccccgacctcgcccagcagcaacggctgctcgccatgctcgaggagaagctgcccgaaggcgccgatcccatactccacagcgacatgggctggcaataccagcacgactggtggcggaacaggctcggggaactgggcatccgccagtccatgagccgcaagggcaactgcatcgacaacgccgccaccgagcaggtgttcggccacctcaaggacgagttctacaccggccgcgagttcgcctcgtacgaggagttcaagagcgaactggacgcgtacatcatccactggaacaccagacgacgccagatacgactggagggacacaccccggaggaattccggaacatgtccctcacagcctaatcaggtacccttaataaaccacgtccaacttccggggcgcagttcatatgaagcgtctgagggggctattttagatggtgccggtggctaggagctgggcgaattgggtttcgctcagcatggggatgccgagttcctcggccttggcggccttggagccggcgtttgcgccaatcaccacgtaatcggtcttcttactcaccgaaccggccgccttgccgccgcgctcgataatcgcctctttggcggaatcacgcgaatagccctccaatgaaccggtgaccaccacggttttgccggccagcgtctgcggcaacgaactggtctcggcctcgtcgacgcccacgccggcggcctgccaagcacgcaaagtcgcgccgcgccagtcgccgggttcgcgggtggcggcgaaccagttcaccaccgattcggcgatttccgggcccaccccgtcgatggccgtcagatcttcaatcgtggcgttttcgatggctgccagcgagcccatcgccgaggcaatcaggcgtgcggtaggcggaccgagccggcgaatcgacaacgcgaccagcacacgccacaggtcggcgtgacgggccttgtccatttcgtcgaacatcttgcgcgtgttttcgccgggccgaatgatcaccggtacatccgtgacgccagtgcgcgtggtcttgtgatccacgcgcacgataaccgcgtcggccggcacgtcatactcaggataggaggctgcggcaaagcccggcatagtaccaagtggcgcctcagccccggtaggtgcgccggtcgtctcgctggcggtacctccctgtgtttcggcagattcgattgcggcctccccttgtgcgcgttcggccagctgcttggccgtgagctttttggccggcgtgggcgcggtccagaaagcaggcacctgatgccacaggccagagccgccgacacgcttacgcacctttttcttcttaccgttcgcaccgaccgtctcatgcacctcgacgattgcggcctcacgccacacgcgcacgtcgcgcagatcggcggcggtcaggttgaacaacccggattcgttagacaataccggcttctgcgcggccggcaattccagcccttccaccggctcgtacgggtcaggctcttcgccgggggcgaccagaacctcggtgatgttcggcgcgtaggtcgccaccgaatcaggccggttctcctccgggttggtcagagcgatggccgattgttcgcccaagtgctcgatgtcgaacgccttgcgtgaggccagcgaaatcacgcgctcggtcaactgggccgggcagctctccacattcgggcagcgaatgtccttgtcaccctccttggcgggtgacagtttcgcgccgcatgaagggcagaactcgggcatgacgaattcgcgcagctggtcctcacgccctttgcgccgttcaagcaccgggccgaccagttcgggaatcacatcgccggccttgcgcaccaccacggtgtcgccgatcagaatgcccttgcgtttgacttcaaatccattgtgcagcgtggtacgagccacggtggagccggccacgtagacaggtttgagcacggcgaccggcgtcacacggccggtacgccccacctgcacggtgatgttgagcagttcggtgttgacctcttcgggcgggtatttgtaggcgatggcccagcgcggcgcgcgcgaagtggcgccgagggtacgctgcaggcccaggtcatcgaccttgacgacgatgccgtcaagtgcatgctcgatgtcgccacgatgctcgccgtagtactcgatcatgtccaggatctcctggaatgaggtcaccgcacgattgtgcggggagaccggcacgccccacttggtgtatagatcgtaggcctgcgactggtcggcgaccacgtcatgggtgccgcgcggatggtccggcccccaagtgagctgccccagaccatgcgcatagaagctcaggcgacgggtggcggtgatgcgagggtctttttgacgcagcgagccggcagccgcgttgcgtgggttggcgaagggcgctcgtccggcgtcctcctgctcgttgttcagggtgtggaaatcatcccaacgcatgaacacttcgcctcggatttccacgaagtccggaacgtcttccttggggccgccgaggtttgcgggaatggagccgatggttcgcacattcagggtgatgtcttcgccggtaacgccatcgccgcgcgtcaggccctgttcaagcacgccgttgcgatagatgaggttcagggcgaggccgtcgattttgacctcgcagctcatgggcaggggcttggattcaggccaatcgaggtcgcgaatcaccgagtcgtaccaatccttgagttcttcgatggagaagacgtcgtcaaggctcatcatgcggctggggtggcgcacggaggcgaagtcgttggagaaggaaccgccgacgcgatgggtgggcgactgcggattgtccagtgaggggaacgccgcttcgagtcgttcgaggcaacgcatgcgcgcatcgtaagcggcgtcggagctgacgggtgagtcgtcgatgtagtaggcgatctgatcggattccacccatgcggccacgcgagcccacaggcgggcggcggcctcagcggtcatcgtgttcacgtcgaaacggtcgaggcgtatcgcgtcgtcgtcagtgggctgcagtgcggctatccattgttcggagccaggggcaaaacgtgcaataccggtatcaggccggacctcggccacatccccatcgtcgaaatcccatgccagttgttcgttcgtgctcatggttgtctatcctagcgggctcggctcccctcggccggctataccgtcaactcccctcaggcggctacgcggatagcgagcgcaggaactgggcttggatgatgtcgatgttatcgccttcgccgtcattcatgcgggccacagccaccgagagcgtgcgggccggcacgaacatgtcctcatccacgcacacgcgagcggcgtcacgcacgatgtcagccacttcgatatgcggccagaccggcagatcatgcgtggcaagcacatgggcggcggcctccaccgattcaggcaccggtatgcactgcgagtccgcacgggaaaccagttcctgcagttcgctttccagcgaaccaatggccccgggagcgatgtgatcgctcataatgtaggctgcggcggctgtgtcgaaccggtcaagcatccattcggcgtacgcgaaccggtaataggcgaacgcggcatcgtcgcggtccaaggccacgcgcagagcattcaggcaggcggcgcgtgccgaatcccaatcctcattgcgggccagttgaatggcgagcttcagatgtgagagcgggtaggcgggcgcgtacgccaccatacggttgagatgcgggatggccgcctcggcacccttgatctgactcaacacgtcagccagctccatgtgcgcgtagaacagattgtccgggataagcaccgtacgctcgtccaatgtggcgaacagccggttgtagaccacgcgctcggcataggagttgaagtatcgaggtacgccatggcctgccgcatacacctggtccaaatgggccacggccgcttcggccgcttcgatggcctgatcggcttggcccgagaacagcatatctcgggcgcgcagacgctccttgtcaagatcgtcggcaagcgtgaacgtgaagtccggcgtgtccttgccatcgatcaacgcactggtgacctgagaggccaaaccggtcagttcgggatcgcatatcgattcgatgacctgcatggctcgctgggccttttccacggagccgagcgacgtgttcctggcgatatcgtggaattcgttgacgccatgctgcagcaggtccactcgctggatagccagtccggcactattctgtgcgcccagcacgtgagcggtcgccggactgaattgacggtcggccagttcgggctcctcctgggatccggtgggagagaaccggctgtccgccaagtcgaagtcggcgctgatgggtttcagaccaccttcgccgtccacgtccatcacggcaccgaacatgcggtaggtttcctcgggattgtcaagcccagcggtgtccagtcgcttgaggaaggcatcacgggtgaaggtgacggtgaccatattgcgcacggtgggattgcggcgcagcacactcatcggatcatcgtccatgccggcggccccatcagcaccgtcagtgccgacgccctcgccgccgataccgcccaggtcgtcgcctgcgccagtatcgtccggcatgccgaacgccatttcgtcgatatcgatgcccttcatcaggtcttcgaactgcgaatcgatggacgcagcgccatcggcgtcagcagattcggccgcggcctgatccgtagcatccgcagacggtccggtaccgttgcctgctcccccggccgtgccgcgttcgtcaccggacgccgtctgcccgaacgtctcctcatgggtgatggggcgggtcgggtcgccatggaaatcaccatctttggggtcggctttggaacccacacgccccaaatcgccactgcgtagatgttcgaaggcgcttagggcctcgctcatcatcgcctcgatggcggaatcctgttcggcaatcgcctcttcaagaccaatggaatcgatgtgcaacgacacctggcgcacggattcgctggtgccgaaactcagcgctgccatcatcaggccgacacgcaggttgtaggcggcgctcatcgacgcgcgttcggcgctgctcagcgcacgccacgtacggcgagtggtgtcataccggctatcgggcatcatcgaggtgccggcagtggtgaagccaatggccacttcacccgaatccaagcgcgaccggaactccacatcaaaccgatacggcaaccgtaaccggcgcaacagtgaggagagggtctgacgatacacccattcgtcgctcctcgccggcgaacacgaaggccgagcggcttgagtgttggtgtcgctcttattggtccgctctacagcgccctcaacactctcagtactttcagcgcccgcagcattcgtcacacccgaatccggcacgttctgctgggtcagcacatctcgaggatcagggaattcactgcgaatctgcccagccgtgcgtgcggcgatatcgaccaggctcagcacggcccgacgctcctgctcgccatcatacgggtcaagcgccataatcgcagggttctcaatgagtttcatgtcgatttgcgcggcctcggcacgggtcaccgtatcttccgtagggttgcgccccaaggaagcgttgcgctccagccaagcgctcaccgcagcgaatcggttgaggttgccttcgatcttcaaggatttcagcgcctgcccgaatgccaaggacttatcccacgtaaagaaatagccgctcgaatacgtcgaggtgtacaggtgcaacggttcggcgccatgcaccgcttccagtcccggcgtggtgtcgagggcgccggcttcgcgcatcagatcggcgaagtgatcctccagaccggaggcccgcatgccgtgggctcgtgccgccaaagtgtcacgcaccgaacggcgaatcgcaccgattggcgcctcacggttgagacggcggaagatattgccggaaccgaatccgatgagcagaccattgatctgcggcaacatatacgtggcgaagaacgcgatggtaatggcatcgcggtattccaaatcatgacgcatcacaggcggcagattggcacgcatctgctcaagcgtgtaccggttgccggccttgagccatgaggcgagccacgtcatgcgtccggtgtcgtcacgccccaccacgccaccggtaatggccttcacgccgtcagcaccatgaccaaggccacgccccaaaccacgcccatgatgcagcgcacttcccaggccatggcctgcacgggagaaaccggaacgtgaacgcggctcgtcgctttcgcccagccgctcaccgtccggcagagtcacttccttttccttgccgaacatgaatcgcgcctgcatatcctgcacgtccatgttggggtcggtgcccacgaatacgcggccatgcgtatcggcgaacgccacctgcgcaaaatgatcgcggtcggggaaaatgccaagcgaaaagccacggcctctggtggagggcagctgcgcccatccaagcaccagcccttccggcacgttctccaattcggggaaggtgcgccgcttgattacaggactcagcgccactgcatggcgagtcagttcgtcgataatgccgcctttacgctcactggtctcccgcaaggcatcgccgaacggattcgtatcgtgcttcttcggcttggacagtcccagatcggccgcgagcgcgttcatcgaatccttcagcccgcccagcagtggcgtgcggttgtgcttcccatggtccgatgtacgttttggcatgattcacattgtctcttgtttgcccgacatcaagcccgaataaagcctatagaataaatgcgtgcattccatagaccacactcgcgcagaccgtccgatgccgtcgaatcatgaacggcacctgcccagccgcccggatacccggcaccggctgcgtttggtgcgcctgctgatcgccttgctggccgccgtcgccgccatcgccgccatggagtgcatcgtgttcaacctgccgttctggcgtacgctcggagcgagcacggatacgaacgccgtgcataacacgctgggttcgggtctcacgcgccggaatgatggcatgttgaccgtcaccgatccgaccaaggcctatcttgaactgaccgcggacggcacgtcggattacctacgcatcgataccgagagcagcaaggtcatcgataaggcccgcgagcaggccgaggccgaatccaaagcgaacgacgataaggaagtcttcaaaccgctggcgaccattcatgtgcgcgcggatgtcgatggcatcaccggcaaggcccagtcgatgaatcccgacgctattcgcagccattatgtcaaggcgccgggtgccggcatcgtgcgtatttggattcaggaagagcgcggcgcgatcgtaccggtcaccgacgcccgcgccaacgtgcgcgtaccgttcgtcatcaattggatgcgcgtgctcgccatggccttggtgttgctgatgattgccgtctggaggccgggatcgcgcctgtggcgtatcacgcttgacccgtccagcactcggcaacgacttgctttcgtggggcttctggcgattcctaccctgcttatcggcgtatccatcatccacgaactgtggtacacgtcttcgctcgtcttccacgtttccggcgattacacctatgatttcgaccagtatgggcatgtggccgatgcgctggtcgccggccggccctggctcgacttgccggttcccgaacagctggccgccaccgagcacccctatgacgtagccacacgtgcccagctactcgccaatggagccagtccgctctactgggattacgcgtattatgacggtcactggtattcctattttggcgtgttgcccgcagtgctgctgttcgtcccctatcgtctgctggccggtcataatctgccgacatccgccgccgagtatattctcgtgctgctgttcatcatcttcttctccttgctggtgctgcgcgtcatccatcgtgtgatgccgaagacttcggtggcggccgcgtcgttagtagtggtctcatcgttggtgagcgcgcaaatggggtatttgctgtatcgcacgaacttctatcagataccgttcgccgcatcgctgacgttgacgtcgctgggactatggctatggctcggcgcggacacgtcccgccgtccgctgagaccatcggaccgatggcaggcgggcgatgccaagcctctctccctgccacgactggccttgggcgccttgtgcattgcggcgaatttcggatgccgaccgacgttcaccttggccgcattgcttgcgttccccctgttctggccgcagattcgcgcgctgggcaccggtctgcgcacacgccgcatcaagccgttgcaggcgttgcgcgcgccgctggcggtaatcattcccgccattctcgtcgtgacgcctctgatggcgtggaacatggttcggttcgattccccgttcaatttcggcaatgcgtatcagttctccatatccgatatgacccggtataccaccccgtccgcggatatgcccgccaacatctggtattacctgttcctgccgctgcgcttcatggatcgtttcccgtggctggcgggctctcccgccccgatgccgcaatggggttattacgaggtgatggtcggcgcgattttcacggccacgccactgaccttgatggctttggcgctgcccctgctgcgcagattggaaacacacggcatgcggccatggctgatgtcttgcttggccgtggcggcggtgctggtcgtattcgacagccgcgtcggcggtttgggatggcggtattccgccgatttcggctggctgatctcgctggcgtccataccggggctactgtggctggtcaatgggcgcgaaccgagccgctcattggcgggggccaacgacgccgcttcaggcgatggcatcgcccgcgtcactccgtggcgttggctgatgcgctgggtcgtgatgctggccgtattgtgggcgctgggcatagccatactaagttgcttcgtgcagtcgcgcagcgattcgatgatcgccaacaatccgacgctctggcatcaggttcagtcttggttcaccctgctataggaccggaccgctcggcgacccgccaagcttcagtattctcccagcattccggccggtgttttccaagacctgcggcataatgtatgtgacgtaattcactaatcgtttacccatactgtcgtgagggtttccccgtgtccactgccgtccgtagtcgcgtcttccagctacaccgtttccgctgaggggtacccggattacacggccaacgccatcaccagcgatgaggcggccgccgcataccgtgaggccgccgccggcgacgccgacggttccggcaatgtcggcggtaccagcacggcgagtcagacgaccacggtatcgagcaatgacatcgcctccaccgagcacgagtttctggtgttgggactgatccccaaggtcaagaacaccattaccctgaccatcaccgacaccgacggcaacgccaccacgcgcaccatcgagcagaccggcccgaaactgctcggcgaggaggaagtacggctcgaacaggccgtcgcccccgacgaatccacggtcaccacgctcggcaatggcctgtacgcgattctcggcaatgattccaacgagcaggatttcatgtactactatgacgcgaacggtgtgattcgcggcgaaatcccggtgctctactaccgctcgcaccgtctgctgttcgacaatgacggcatcatgtggttctccgcctccaccaagcatttcgtcggcatgaaccgcctaggcaagctggtcaagatcatcaatctgggcgaccagtacatcctgcaccatgattacgcgctggattccgacggcaatatcgtctctctggccaccgatctgaaacattcggaccatgccgtgcaggatcaggtcatcaaggtggacaccgactccggcgaggtgagcctgctggtggatttcggcgacctgttccccgattacaagcaatccaccgatcattccggcatcgacgaatccgatccgaccgccacgaaccgttgggactggatccacttcaacaccatccagctcatggatgatggctccgcgttgctgtccgcacgtgagacctccacgatgatcaagatcaatgacatcgaaggcacgccgtcgctcgactacatgatcggcgagccgagcgtatggaatggcatggatgcgcagccctccttcctgaccaaggtgggcgattccggcgacaccggcggccagcactcaatcactgtgcagtacgattcctcgctggaggacggccagtactacatctacatgttcgataacgacttcggttatgccatgacccgtcctgatttcgattggaccatgatcgatggcatttcgaccgcgcagagctccaaggatgagaactcgaactcccagttccgcaagtacctggtcgacgagaacgccggaacctacaccgaagtgcaggacttcgatgtgccgtattcgccgtatgtctcctccgcacaggaactgtccgatgacctgaacctggtggacatcggcatgcagggcctgttcggcgtctacgatgacgacggcaacctcaaggcacagtacaagatggtgctcagttcgggatacatctaccgcgtctaccagtacggcttccgcggcttctacttcgcgtgaggattggcatcgacctcacggccgatgccaatcctccaacggccgattcctatctgctaccgcttcgcagcctcatacttgcggcgaatcagatcctcataaaacgccacagcctcagccggcgctccgtcaaacgcgaccgcgtgctcgtccagcaccagtacgcggtcgatggcgtattcgggccggcggatcatatccgtgtcatgcgtggcgaaaatcacctgcttgttgtagctgaacaacgccttggccacatgcgcggcgccaatctcatccaatcccttgctcggctcatccgccacaatcgcactcggctcaaagctcagcgcggccgcaatagccagcaggtgccgtttctcggagtccagttcgctggccttggccttggagacctgcgccaaatcaaaatgcgcgaacagattgccgatgcgcgcatgacgttctgactcgggcaccttgtgctttttcagcgcttcggaaacagcctcggaaatattcgccgcttggtaaaagctgttcggaatctcctcgcggcgaactttgccgaccagattatcgatgcgcttcgcgtccttcttcacagccgggtcaagacgttcctcaccgcccgcaatggtcaccgtgccggcgttggccttcaacgaaccgtccagcagacccagcaatgtggatttgcctgcgccgttcagtccgatcacggccacccgccgctcgctgatggtgatgtccgtgggagcaagtcccacgtgcccatcatcatacgtatgcccggcctgttccaaagtgaacgtcagcgatgccgggtgtggcagttctttcggtctaaacaagaatcccatgccgccattgtacgtggagtacaggtgtggtgccggcaaacaccggcctatcgcagcaaagcggcgacggtattgagcacggcgcggatgccacgctcgaattcgtccggttcgggtagcagggaaacggccaggtatccattggaagtcatgtcgaagaagtagccgggctgtccggtcagtttgtgctcgtcaatcaaccgcagcaccagctcgttctcatcgatgactgaaggcactcgtagcagcacgttccagccgccttcggcccgtagcacgctgaccagcccgttgggatcggcgtcaagcaactcgtgcaacttggccaggttattgcgcacgcgctcccccacccgtctggtctgtgcgggcgcggcgttcaataatgcgggaatccgttcggcgatgatgtcactcatcggcagataatcatcggcgatgacgtccagtcgacgctgtgcctcggcaacgtcctcggcaggtccggacacctgaatccacccgactttggcgtgcggcgcggccagcattttggagaatccgtctagggcgaaggtgagcacgccgcgctcccccgcgagccgtgcgttgccggggaaaggttcgagagagtaatcgaagaacacttcatcggcgataagggcgatgccatgctcacggcacaatgtcacgatacgtgcacgctcggttggttttacgtacgaaccggtcggattgttcgggttgatgagcaccaatgctctgatgcgttcgccaccgggctcgctgagcagccgctcgagttcggcgatgtcgatgaaccaggagccgtcgaattgcaactggtattcgaccgtgtcaacgcattcaagccgtgcaatcgactcaatcagcggatagccgggtttgggtgccagcaccgcgtcgccggcatcgcaaagtaacttaatcagccacgaatacgcctcggacgtggagctcagcaagtacagggcgtccgggtcaacgccctcgatggcggtattcgcattgttgaaagcggcatggcgctcgttcccgccctcgctggcggcgggcgaagtcgactgagggctgcttgcgtctaccgcctttgccgtattgaggaatgcggccaatgcttctcgcgccgcacgcggtccacgcgggtcggccgtatacacgctcggcgccaattcaggtgccagcccgtggcgggtcggattggaatcgttgagtttgctgagtgcgatgccgtttgccttggctgccgcctcggccgccgcaatgggattcggcgcagaaatatccacacgagaagagaaatgcacgctcataccctcccacgatagagcgtggtgccccctgccccgctctcaaacgcgcaacattcccgggaacgcgtcgccacagacctccatacacacgcccactttgcgcaacattcccgggaacgcgtcgcatacctttcctatgcaatgcaaaaggccgcccgactagtcggacggcctgaagcatattcgcgggtcagcgctgcacacccacgctcactggctcactgctgcttggtgctggcatagtaggcggcaccgacgatgccggcctggttacgcagcttggcgggcacgatcggggtcttgatatccacgtacggcaggaacttttcgctctgacggctcacgccgccgccgacggtgaacaggtccgggttgaagtacttctccataaggccgtagtacttggtcagacgcttggcccacttcttgtagcccagttcctcattctcgcgaatcgcggaggaggcatacttctcggcgtccagatgcttggcgctcaggatgatgtgtccgagttcggtgttcgggatgagcacgccgttgtaaatcaaggcggtgccgatgccggtgcccagtgtggtggcgatgaccagaccatcctggcccttggcggcaccgaactggacttcggccaggccggcggcgtcggcgtcgtttaccacgacgaccgggcggccgcaggcttcggagaacacttcagtaacgtccacgccaatccaagactggtcaaggttggccatgaagtcgagcttctggccgggcttgatcggcgcggggaaagcgatgccaacgggtgcggattcaggcacttcgaagtggtcgagctgctgcttgacgattttggccacggcctgaggagtggagacctcgggagtgagaatcttcaatcgtggctcggcgaaatcgcccttggtcagatcgacaggtgcggccttgatgccggaaccgccaatgtcaacaccgaaagcctgtgcagtttcaatcatcgttgaccttcctttccatacgttttcatcagttcgtaaggttgcgcccagtttaacgcgaattacgctcaacacgaaaccattacacaccaattgtgcaaacgtgtgcatcgtcgccggtcactacgtaccctattcgtatcgtttttcaagcctgacaatgggcaatgcatgcgatttcgcatactaggaaaaatcggcgtctatggtggcctgactctgtgtcgcgcgcgataatgggaggtatggcagaacatacccaacttattgatgcaattaacatccgcaccgccgtacgcgcctacgatgatgagccgatcgacgacgatacggcccgccagctcgagatggcgcttcagccgatcaacttactcggcgatctcaacattcagctggtgcgcgaccagcccaaggtgttcgccgaagccaatgcttcaggtcatctgaccaatgcggcgaattatctggccatcgtcggccccgcgaacgatgaggaagccaaagagcgtgccggcttctatgccgaacgcatggtgctcacggccacgttgcgcggcctcggcaccttatgggtcgccggctcatgggacaaggcggaggcggccaagcattgccgcgtcacctctggccaggagctgtatctcggtgtggtgatcgggcatccgaagaatcatctggattatcaggcgaaatcctatgaggagctatgcgaagcgcaacgcacgcaccgcgccaccaagacctatgagcagttcaccgccacaatgagcgatgaggggcgcgaggccgctccggattggttcaagtccggcgtcgaggctgcgatgaaggcgccgagcgcgatgaaccgtcagccaatcaccttctcgtataatccggccgacgataccgccgccgcgcatatcgatcagagtgcggaagatgagcatcacgcgttcaatgacatgggcatcgccaagctgcacttccagatcggtgccggccaaggccagtgggcttggggcgacggtggcctgttcatccataagtaacctgtagtgacccccctcatagaggggagccactactacggctacttcagcgacggcatgggcttccaggtggggtcgtgcatcagcttgcgcgagtcccaccagcccttggcaatctgtaccaaaccggtcttgaggtgctcgcgatccaccatcaccaggcgaatgacttccttggccgcggtgagcacggtacccagtccaaacaccagcggacggaagtcaccataggtcatgaagtaccgggccatgtatccgcggttgcgcatgatgtgataccggttcatgtcggatgtggagttgagctggcgcacgccggcgatatcccaattgccgatttcgcgcgtacggcgcaggatcacgtcgggcaccacaatcgggttggtgaccttgctggcgcggtagccatacatcgtgtcatcccagtagatgaagaagcgcgggtccggcagaccgatttccgtaaccacacggcggttgaacaggccgccttcgaagcacagcgtgtccatcactcggtatccggccgggccgaatgcggcgggcgcaatcgggttcgggatgcccagcggcacaatgaagtcgtactgccagtagaacgggccgccatcgtagtcgaatcgggagccctgaatcacctcgtgcttgtcggtccacttggacagcttggcaatggcgtccggcagcacggccacatcgtcatccatcacccagaaccatgcggcacccagctcgtaggctttggccacgccggcggagaaaccgcccgcaccacccaggttctcggtctgcggcgcatagaccacacgttcttcgttaccggactggtcggccacggtggtgccccattggccggtcaccttgccggcaaacgcagcgaccatgtccgccgtctgatcggactgctcattgtccacgatgacaatgcgccacggtgcctgttcaagcgccagaatcgaatcgaacagtgtctcaagcaactgctgacgtttgtaggtggtgacgatcagggcaagcttgtcgatggtgttgttgggtttcttcacttcagccatggctcccattgttgcacttgaccggcacaagacgaatttctgcacagtgaaacgcgggttgcatacgtccggcgcatggcgtatgaataagcctgtcagtttcagggaaggtgcaattccttactggcggtaacctgcaccccgggtttcataacggggatggcaggaagcccgcgacccgcgcaagcggctgatccggtgagattccggagccaacggtatagtccggatggaagaaacgagggctcattatgagtgtatcttcgcgtattcgcatgcaagttgttcgttctgtggcacccgaggccgagggttcggccagcacgtccaccgccagcaccagcgccaaacttggctcacacaccactggtgtggccgattctggccgctggtccacgcgccgtatcgccatgtatgcactgttcgtggcgctggcgatggtcaccagcttcattgaattcccgattacgccggtcacttggctgaagtacgacccgtccggcatcgtctgcctgattgccggctttgcgtatggcccggccgccgccgcaatcgtgtctgtgctcggctttgtgccgcacatgttcgccaatccgtggggttcgctgatggctgtgctggtggcgctgttcctgtctgtgccggccgcgttcatctaccgtaagatccgtacgcgcaagggtgccgccatcggcattctggtgggtgcggtgctggccatcgtggtggcgctggtgagcaacctgattgtcacgccgatttacgcgcacatgacctaccaagctgtggccgcgatgattctgccgattctgctgccgttcaacgtggctaagatggcgattcacgccgtgatcaccttcctgatctacaagccgatctccaacctgctgtccaagcagcagtgactggcctgagacgggccgatgcccgccacgactaacgaccactcaaagaccactcaaagaaccagaacgcagaatcccggcacgggccgggattctgcgttttcgcctatcagttacggattgctgtttcatgaccgttgcaccccattccttcgacgccgacgagttccacgattctgccgaacctcacgcttccgccgagcctgcctcccccgccgccgtgctcaaggacattcgtttcagctatgaccgcggcacctcatgggctttggatggcgtttcactcacggtccatgccggcgagcgcctatgcttggtcggtccgaacgggtcgggcaaatccacgttagcccgtctgattgcgggattgaccgcgccggacggtggtgaagtgacgttactggggcaacgcgtgtacgcagccggcccgaatgccgatgcctatcgtgctgcccgccacggcatcggtatggtgttccagaatcccgaggatcagctggtcaccaccgtgttggaggatgacgtggcctttggcccggagaatctcgggctggagcgcgagctcatcggcgagcgtatcgttgattcattgcaggccgtggggttggcgaacttacgccagtccgacccgacccgtatgagcggcgggcagcagcaacgcgcctccatcgccggcatgctggccatgaacccggcaatgctggtattggatgagccgaccgccatgctggacgaatccgcacgcgccgaagttatgcgcattttggatgatttgcaggcgcgcggcaccactattgtgcatgtcacgcatcatccagatgaaaccgttcatgccgatcgcatcgtgcacatggaggccgggcgaatcattggtatcactgcagccgtcgataatcgatccccgctagcggaggctgtctcgcaaagcgagactgagggtagtatcggcacagaagccgcccccagtcgccctacgaacgacagcccccgccagcgggagcgcgaagacggctccgaactgccgctgctctccgatggcatcggtgatatgacgaaccccattattcgcgtctcgcatctgacctatcgctatccttcggccaaacgggcggttatcgatgacctgtcgttcaccatcgcgcgcggtgaaaccgtggcactgatgggcgtgaatggttcgggcaagtcgacgctggtgcgcatgttgtgcgcactgactgcgccgaccgccggcagcatcgaagtggccggtgttccggtggcctcgaccggcaagcgcggtcgcaacgtgcgcccgaagtcggcgaatcgcaagcaattagcgcaattgcgccggcatgtgggttacgtgatgcagcatccagagcatcagctgttcgctgacacggtagccgaggacgtggcgtacggcccacgcaaccaagggcttggcgagaccgaggtagccgaccgcgtgcgcgaatcactggaactgctgcatatcgggcatcttgccgaccgctcccccttcgacctgtccggcgggcaacaacgattggcagccattgccggcgtgctggcttgcaatcctgacgtgctcatcatggacgagccgaccgcgagtctggacgcccaagccaagaagcgtatccatgagctgttgcgcacgctcaaatcgcgtggcgtgaccgtgctcatcatcacccatgaccgggaggaggccgagcaaatcgccgaccgcgtggtccgtatgccgattgccgcccccgcatccggcggccccgtcacggccaccgtcaccgagccggccgtatcctccaacggccctgcgcactcagtgatacaccgacttgacccgcgcgtgaagatggtgggcttcctggccgccatgttcacgatgttcgcggtgaacacgccaacccagctcgcgctgggcatcgccatcaccctggccgttatcgcggcggcacgcctgaacccgttacgggtgcttgaatccattcatccgattctgatcctgctggtgctgatgggcgtggtcaatctgtttgtggtacgcaccggcacgccggtggtggcgcttggcccgctaagcatcaccgatcagggcgtgaccatagccgtgctgtacgcctgccgtttcgcattggtaatcattctgggcgcggtgttcctcactaccaccacgcctaccgccatgaccgacgccttcgccaccttgatcagtccgctcaaccggctcggtatccatgcccaagaaatcgcgctggtcatgagtctggcattgcgattcattccaacgctgaccgacgaaacccgcgccatcgtcgacgcccaatccgcgcgtggcggttccatcgaaaccggttcactggcccagcgcatcaaggcgatgagcgcgattatcgtgccgattttcgccggcacgttgcgtcacgcggacaacctgagcctcgcacttgacgcccgctgctacgaggagggcatccgccgcacccactggcgtgccctgaccatcgccgcgcgagatctcatattcgccgctgccgtcatcatctacatcgcggccatcatcgcgctgtagggcggcaaacagcgcagacagcaccggttgctatgctggtgtggttatacgaaagatgtaaggaaattcccatggcattgaccaagaagcaaatcaagcagctgcgcgcgatggcgaactcgctgaagcccctgttctatgtgggcaagaacgatttgaccgagtcggccgtcaatcaggccgatgagaccattgagaagcacgagctcatcaagtgcgccgtgcaggacggttctggcctgaccgccaaggaagccgccgccgagcttgccgagcagctgaacgccgaagtggtgcagtccatcggcaatcgtttcgtgctgttccgtcgctcccggcgcgacgatgtggagcatatccgcttggtgcgcgagtaatgttcgccccgctcgatcccgtagcttgatatgagtaatggcggttggaatcagtccgattccaaccgccattactcatattcgcccagcgagcaccgtcactgatccaagatggacccgacgattcccgcaacaatggtcaggaccaaggaccccagtaccgaccaccagaaaccgtgtacgaagacgcccacgccgaacagactgaccgccagccagctggcgagtcgcatgaacagccaattgataatcaaggtgaccagcccgagagacagaatcgcaaacggcagtgcgatcagatgcacaatcggcttgattgacgcattaatcagcgccatgaacaaagcgaacgcggcgatgccgagaatcggaggctcccccaccggggtcatgccgggagtcaccgcgaccatgacggcggcggcgatagtcataatcaaccagctggtcaggaaacttctcatggcccaatcgtagcgcggcaggttttactattgggcaaaacatgagatgatgttgtgcagaaacggtaagaaggtattgccgttcccgattgagaggggactgacccgcatgactgataatcaacaacaaccgtacggttcggacagtgttccgcagccggcacagcccgcacagccggcacaaccgtcttacggccaagatgccgcacagcagccgcagggctatggcgccccacagcccgccgcatacgctcaacccgccgccggaagctacggccagcagcaaccgcaatacggccagcccgccggcgcatacgctcagcctcagtacggccagccgcagtacggccagcccgcacagcccgcagcgggctacggccagcagcccggctatggacaggcttaccagcagccgaacgcctacgcgcagccgcaatacaccgccgctccgtatgccgccgccccggtggggcaatcgtccaagtccaagctggctgccggcctgttgggcatcttcctcggcggacttggtgtgcacaacttctatctcggcaacaccggcaaggccgtggcccagctgctgctgacgcttgtcggctggattctgctcggacttggcccaatcgcagccgccatctggggctttgttgaaggcatcatcattctgtgcagcaagcccggctcaccgtggcataaagacgccaacggctacgaactatcagactgaaactaacctcgggccacgttcattgggcccctgatcaaccacgcctctgcaggtatcatctcgatgccgcagtcgcagcgggatgcgacacgccggccgtgtacatgagttcatgtacacggccgttttctttgttgctttcaccctcaaaacaaacattaatcatgttcacttttgcaagatatgaacatcagacatcacagactaccataacttcccaattgcattaccaatagattaataaccggcaaaacggcttatatccgccatttttcatgctaggctttgaaaccagcacatcaacaaagtgcacaatccttttctacagagaaggtaacatgttgttcaattcatatgtgaatcgaacaatgccagtacttccctaggtgcttgcttggggaacgccatgctgaaaggaacacattatggcggagggaaaagtcatcatcgtcaacccggatatgttcggcaaggacccggattcgaaaacaaccaaggccaatgaagtggccaagagcttcggcctgagcgacgcggcgttggccgaggtcgaggacttcaaggcacaactcaccaaacacaacgcctgggatctgccgttcatgggatacgtcaacgaggatggctacggttacgcctacgtgcccggtgccgccgtggtgtacgacccgtactgggacgcccaccaagcattcctggcgctgcctaaggacgtgcagaccgcattcgccattcgtatgctgttcacgcaccgtccggtcgaccgctatggcgccagcatgttcctgcattaccagcgtggcttcaacgtgaagttcgagggtatcggcgcgaaccagtactgattggtactgactatcaaccatctttttcggattgcccgataaggggcgtataacaacggtgttatacgccccttatctgtattcagtgtcaggcgatggccgcccgccgcccgacacaggcgaatcagtatcgcacgagattcaacagttcctgctgtttggcatagcgggaaacgttggtcagggcgatgcggatgatgtgttcggaagtcttttccaaatgattgccgccggccacatgcggggtgatcaggcaatgcggctcatcccacaacggactttccgccggcaacggctcaggctcggtgacgtccaatccggcaccgtggagccgtccattgtgcaaggcgtcagccaaggcctcgggatcgatggcgtcgccacgcccggcattaatcacgatggctgtggatttcagacgacccagacgatccgcattcagcagatgatgggtctgcggcgagcgcggcaccgccatcgccaccacgtctgccaatggcaacagcgtctccagccgctcgaagccatacatcttttcaatgcccttggccggcacgtccgcatgacggcgcacgccgaaagtacgcatacctacggattgggcaagctgagcgaaatgcgacccgatgtcaccgacgccgataatcagcgcgatgccaccttccgggctcaataccggtccttcatcctgccactgatgatcacgctgattggaggcataccggttgaggttcttcatcaatgcccacatggtggcgaacatgtgttccgacacgctttggccatacgcgccgctcgcattggtgaccatggtgccgcgaggcagcacacccgggcagatgtacgcatccacaccggcgctgaaggtctgcaaccattcaagacgggtgtattgggaagcctgcgagaccggaaagttgccgatgactgcggtagctcgggagcgaagctcctcgggaacagcggccgaccagaccatgtcgccgcggtgcgcttcgtcgcccacgaattcctgcggcacatcgcgagccgccttggcgaaagcccgccgttctccttcgttgagtggcaggcagttgacaatcagcttatgcgtgttctcaatacccatggttcaccaaactaggcggcagggcagatattatcgcggtttcctcatgctgaaccaatgccgaactgctaccggaccaatgccgaatccgccccatcaaaccccaccaaaccaagggacaacccattgcgcatcgaccgtagcgtccgccccgaaccgtacactcacaggtggttttgtgattccatagcgtgcagccaaggcagtacgattgccggtttatccgcacgcacaggtacctacgccggttggtaaaccttacattccataccttgcaaccgaacgtttaggagcatgtatgcctgagcagcatattgataacgagaagattcccacacgtcttatcggcgcgattgtggctgtcggctcacttgccttcattggcattctgaccgaaaccgtgatgaccgtgcttttccccgcactgatgcgcgaattccatgtcgacacggccactgtgcaatggattaccacgatttatctgttggcggtggccgctaccatgcccatcagctcgtttttgaagcgccgattcgcgctgaaaaccatttttcttgcggctgtgattctggccatcgttggctcgctgatcatgatcgtcgcccaagccttcccgctgctgattgtcgcccgcattattcagggcattggctcaggcgtggccacgccgttgatgatcaacatcatcctggagcagtctcctcgttcgaaaatcggccgattgatgggcgtaggatcgctggtcattaccgtggctccggccatcggcccgaccgtcggcggcgcggtgaccacagtgctgccgtggcgcgcgattttcgtcatcgccattccgctggtgctaatcgcagcatgcatcggcatgaagtgcattgagcagaagacaccgaccgaggctgcctatcttgacccgattcagcttgggtccattgttgtcgcgttggtcggtctggtgctggcgctcaaccaaggtggcgtggccatcagtgcggcggtgtccggcaagtcagccacacgctccggcattatcgccattgtcagtctgattgcgggcctcgccttgttgatcgtgttcgccatgagttccaagcgtgccttctccccgctgctgcgccttggcattctcaaggatcccgccgtactgttacacgcctgcgcatatctgctgctgccattggtcgccatcggctacggctatgtcatcaccaatgtggcacagctctcgctcggcaccacggcatttgtggccggctctctggtgctgcccggcgcactggtcggcgctgtctgtgccccgcttggcggctggttctacgataagttcggcgcggtcaagccgattctgattccgctcggcatcgctattttgggcccagtgcttatgctggtgttctcgatgcagcttacgcccgtgctgctcgccggattctatttcattttcggtctgttctattccatcggcaatgcgaatgtgatgaccagtggcctgtcggaggtctctcccgagttcaagccggacggcaacgccattttcaacacgtgtcttcagtttggcggcgctgccggtaccgcactgttctccacgattctttccgtggctcaggccggcgcaggagaagaaggcaccgctgagtttgctcacgccactgccgtcggcggcacatggacgtttgcaacgatgacggttatctgcctgattggctggtgctgtctggccaccgcgttccgcattcgcgcggcacgtaagcgtgcataaatctgattaccaatagagtcccagctttccaaacacgtgtggggcgtgccccgggagaatcccgggtcacgccccacacgctaatgaaaggaagaaaaggagaaagaaagctttggcgggcagtgccggctgctgtgaccttgccatcacagcagccgggctgatcccgcctattcagttatggtgtgtgtcgtattcggtgcggagaccgagcgggcaagcccgctattttttatctccgccgaccgccatcaccgcgcgctgaagcacaacgaagacgaggatcatgagaccgataacgatggtggtccattcggccggcacaccgaagtcagaggtgagcggatcgaggatggagcggaccagagagccgagcacggagccgagcacgtagccgaagccaccggtgatgatcgtaccgccgatgaccacggaggcaacggcgtcgagctcccagccaacacccacagtgttcttggcagagccgatgtttgcagtgtacacgatcgaggccagggcggcgagagtcgcagaggtcaagtagatgatgtactgcgtgcgcttgaccggcagacccatgagttccgcggaggaacgggagccgccgatggcgtagatggtgcgtccggtgcgggtatggtgcaggaagacgtagccgaagaccacaaccaccagtgcgatgatcacgccgacgttgaaggacagatcgttggagatcttcggattgtcgatgatcttgatcacgttggagatgaacgagaagtcattgccctgcgggaaggtcagcgagtcggtggagatgatggaggcaagaccacgggccaggaacatcgtcgacagggtcgcgatgaacggctgcatgttgaattcctcgatcaaggtgccggccagcaggccgaacacagcgccgatgagcagcatgatgatcatgaccaggaaggcgggcacgccggcgttcgccagcttcaggccgacgactgcggtgatggccacgatagcaccgacagacaaatcgataccaccggtcagaatcggcagggtcatggccacagccagaataatcaggtaggcgtggtcaatgaacagggaggagatgaagcccagtcgaatgtaggtgccgaacaacgcctgacccatgatgatcatcaggatgaagatcaccacggccgcgagggtcgggatcatctgacgatcgagcttgaagcccttcttgggagccttcactttgtttgccgtagctgttgtcatgctgccaccgccttagcttgagccttgagcgcgcgcttgcgtttcatattcgcgctcaggttgtgaatcttcggagcctgcatcacgcagatcacaatcacaacgacggcgaagaaggccggagttgcctcggcgttgacgcccagggtgatgatggtcttgcggatcatggcgataattacagcaccgacagcagagccggcgagggagaacttaccacccagcagtgaagtaccgccgatgacgactgccagaatggcgtacatttcgaggtcctgaccggtcttaaccacgtcgacacgcatcacggatgcggtggcgaacagaccagcgatggccgcgaggaagccggaaatcgcgtagacgaggaagaggatcttcttcggcttgataccggtcatacgggaggcttcctggttgatgcccacggcctcaatcatcatgcccatagcggtcttgcggcacagcaggccaacgagaatcacaatgataacggcgatgacgaagttggcgggaatgcccagaatgaagccgttggcgaaccacttcagcggttcgttgccagcaactgcggaggcgtcggtgttctcaccggaggtgatgaccttggccataccacggccggcgagcatcataatcagggtggtgatgaacggctgtaggcccaggaaggaaaccagagcgccgttgacgcagccaatggccagaccaacagccaaggcgatgaggatggagagccacacgttcatgccattggacagggtctgcatggcggcggcacctgccactgccataacggaaccgaccgaaaggtcgataccggcggtggagataaccaaggtcataccggttgcaatcatcaggtatcgggcagattcctggagcatggtgatcagcgggccggccagaccaccggtgttgctgttccagctcagagccaggaagtcatgctggaagatggtgcagatgatgaccagaagaatgaatgcgacgatcgaccaggtcaggttgctgctcagcagcttcttgacaaagttgttgccctcgccttttgccttttcagccatctcatgcctcctttccggtgtttacgttggtgttagcgatggtttcgacgatggtcgcctgagagacggtgtcgtcgttttcgatttctgcgatcttgtggcggtccttgagaacctcgatgtcgtcggacagacgcacgacctcttcaagctcggaggagatgaagacaacgcccatgccctgagaagccaggtcaagcacgacctgctgaatttcagccttggcaccgatatcgataccacgggtcggctcgtccagaatcagcagctcggggtgcgtggccagccaacggccaatgagcaccttctgctggttgccgccggagagattcttgaccgggcgatccgggtcggcgggacgaacgttgagttccttcatgtacttgtcaacgatggcgtccgcttccttcttgggaatcggcttgaacataccgcgcgttgcctgcagggcgataaggatgttctggcggacggtcaggtcgccgatgatgccctcatcacgacggttttcggtggagtacgcgattttgttcttcaaagccgtgtacggatcggagatgttgaccttcttgccgttgagcgtgtaggtacccgaatccggcttgtcggcaccatacaggagtcgaccaagctcggtacgaccggagcccagcaggccagcgaagccaacgacctcacccttgtagatgtcaacatcaaccgggttgatggtgcccttcttgccgaggcccttgacatcgacgatcggcttctcgccaggggtgatttcacggcgagccttcttggcaccaatctgggacagctcggcggcggacttaccaatcatcatgccgatgagttcgtcgcgcggggtgtccttggtcatgacctccttgatgaactggccgttacgcagaatggtcagacgatcggtaatctcataaatctgatcgaggaagtgggagacgaagaggatggccacgcccgagtcacgcaccttgcgcatgatcgcgaacaggtccctgacctcgttggcatccagcgaagaggtcggctcatcgagaatcagcaccttggcgttgataaccatagcgcgggcgatggcgaccagctgctgcatagcgatggagatggagctcagcggagtgtgcgggtcaatggattcgaggcccatctgtgccaaatacttcttggcggcctcgtgggtcttcttccagtcgatgccgaaggggccgcgcttttcgtggcccagcatcacgttctcaccgacggaaaggttggtgcacaggttcacttcctgatacacggtggcgataccggcgttttgtgcgtcgagggtgccgttgaactgctgaggcttgccgtccaccataatggagccggcgttgatcttgtacacaccggtcagagccttaatcatggtggacttgcctgcaccgttctcacccatcagggcgtgaacttcgcccgggtagagagtcaaatcaacaccatccaaggccttgacgcccgggaattcaatcgtaatgcctttcattacgacgatggggtttttatctgtcatgtctttgccttaaacgagaatgaagtgttatcgttttgtgatatttgagccacacatgagtgatggtgtggaaggaacatccttctcacaccatcacatcaattatttggttcagttatcaatgagtcgcagcagacttatcagtaggcgcgggtgttgttgtccagagcttccttggcggaggcggcgtcgaaggtcttggactcgatctcgatgtccttctcaacggtcttgccatccaggtagtccttgacggcctgagcggtttccttgccgaaaatcgggttgtactcgatcacgtaggagaggtcaccatcaacaagagcctgcagagcgttcttggtaccgtcgatggtgatgatcttgaccttgcccttgaggccggcggcgtcaacagcctgagcggcaccgaggcccatctcgtcgttctgagcgaagatgaactgcgggttgtcggacttgtacttgtcgagcagaccagcggtcacggtcttggcctcatcagtggaccagttagcggactgggactcaagaaccttgacgttggaggcaaccttgttgccccaaccagtgccacgatccttcaccacggacaggccggcagggccttcgaggatgaagccgttggcgccatccgggaagttcttgttcacgaactcggcagcctgctcgccgcaccagacgttggacggtccgatgtgagcaacgatggccttcttggcctcggcgtccttgacgtccacgttacggtcaacggtgaagaccggaatctcagcctcagcggccttcttcagggagtcatcccaaccggaatcctcggtggaggacaggatgatggcgtcgacttcgtcgttaacgaacttgttgaacgcctgaatctgcttctgctgatcgttgttctgggtcggagagtaggtcaggtcaaagccggcatcctcgaatgccttctgaatgtccttctcgttggcggtacggaagccgccctcaggaccgacagccacgaagccaaccgtcttcttgccggagtccgagctgccacctgcgttgctgggaccgcatgcggcaacgctgacaagcgcagcagcagaagcaacgagggcaatggccttcttccaattcttcataaatactcctcctcgagcagtgtttattttttggatgatctttcatcctgtttggtgactgttcgtcatcgacagcctctagtatgacgctcacaggccaaatgttcaatcgcatgcgataacagtttgataacaggtttataacaaattaataacagtggttcaaaaatggcgtcgcaacactgttttgccttgataacagaccaataatagtgattggttgcgcagcggcaatgccgctcgccagccgagcgacaaagccgttgcctcatacaacaagaaaggttattatgaacaccgtttttcttataccatctactgcgcaccgagggcagtgacctggctatcggcgatggtccaggaaccgtcgagtgagccagaaacggagcgaacaatacccaaatcgtccacaatggccaggcgacgggacaggctaatctgccccgatgccatcgacgttatggttccattaggcagacgctgcgcattggccgggcctggtgccatttgacgccatgcctcttgttgttcgctgtttccctcaggaggtgtggtggcgtacaccagattcagatcgttgtagaacgtgagcatggtgacgtgtctgagcacactcacttgggtggccgctttgctcagaccgctcagtgttttatcaccgttgcgcgccacaccggtcatcatcacgccgttcgtgtcctcgccctcgactgccaacgccaatcggcacccttccggagaaaccgccaatgccacaatgctgtcggcagcgccaagccaatcaagcttcagatcggtttccttacccccatctgacacatgcaattcgcgcccgttctcggatacagcccatacttcgccatccagaccttcggtaatcgatcgcatcgactcgccggagaacatcaccccacaggacgcaccatcagatttcaggcattcgacgacaccgtccgcacgcaacaccgcaccgccggatgaggaaaaaacgaagccccgagcatcgtcatatccgggggcctcccctacacgcaacggactggagctggccagggaaacgatatgcccaccggtcaacgtgtatacgcccgctgtcggctgctcggtagtaagtttcacatttgcgtcggcatcagaatagtccactccgtcgccggtaatcttcagcgcgtattcggcattgccgtcgcccatagtcagacggatgcgatgtaccagcaggcctcgttcttcctcattcaacgcattgataccgctgttaaggtgtatctccaccacattgttcttcaccggcacgctgtcgaccgcgagtttgatggtaggcaagccggtgcctcgcagcactccttccaaccaggagggtgcatccgagagtacttcaccgactgcctgggtgcgccagttgcgccagctcagccatcgaacatccggtatgagctgtttgccggatgtgctcacctgatacacggatacttggcggaagacttgttcaaaatcggcggtggatatcaccacgccgttctccaacgaggagatgcgccactggccgcttcttttaatcaagatataaggaactttgctgatcgtgctgctatctgtcggcgtatacacgccatgcgagtccagagagccgaccacttggagctgtacttctacaatcagcgagctctccgccccttgcggggtactcatcgtattggcacggcggcggaaatccggcgtaccgctgtagaccagtgccgaggaatcgccattccatccggccgacgccgaaccggtcagaaactcacgggccacacggtagccatcggactgtacgccggcaggcatggcatcatagaaccctttgacgatggtttccggctgcgcatcgtccgcaggtccctgaggattggtgtaaacacgctgagtctgctgttccaccggtgccagagtctgcaccgagccgctaatcggcaaaccgaacggacttgagcatgccgtcatcgtgacgcaacagactatggccgcgcctgcggcggcaatcgttctggtcactcgtctcatagcggcctccccatcatcgtgtcgcggcgaacctcatgataatcatgtgtgacttggctggtggccacaccaaacccaccggtaatacgcaggtcatcgggcgtttcagaagcaaaattcaccggcagttcagcgtccgccacctcaccttggtcggggtcacgcggcagcaataccaagaaccaggtgccctcccccactgccgaacgtacacggatagtaccgtggtgcagcaaggcatcagtcatggcgatggccaagcccaatccggtgccgccggtaacgcgcgaacgtgaagggtcgcttctccagaatcgatcgaatacatgagcgactttgtcttcgtcgataccaacgccatagtcgcgaacgctgatggccacggctttgcggttggccgcgacacgcacttcgatcggccggtcctcagcgaaatcgacggcattggccaacagatttctgacgatgcgaatcactcgacgcgaatcgatacgagtcaaaacctgcacattgggcagatacgtgtgaatcggcacccgtttggcttgggcgatgccggcaacttggtccactgccgtttcaattggttcgcataaatcggtttccacaaggtcaagtgccgcataaccggcatcgtagcgggagatttccaacagatcggcgagcatgtcttggaatcgactgatctggccggccaacagttcgaccgtacgcttggtggaggggtcgaagccgtcttttttcatttcgagcaggtcggaagccatacgcatggtggtcaccggggtacgcaattcatgactgacgtcggacacaaatcgtttctggaaaacgcttgcttcctccagctcatcaatcttctggttgagcgcatcagccatcgtattgaaggattgctgcagcacaccaagctcatccttacgattcacggtaacgcgcatatcgagattgccggaggccagtgtttccgaggccgctgccactcgttcaatcgggcgcacgatgccacgaatcaccagccagattactacgcccaccacgatggacagcaacgcacagatgaccaccagactgagctgaatctgcgtcaaggactgctgctggaacgtgtacgaataaatggcgaagaattcgaggttgccggccacgccaaagtccaatacggtgccgagcaccgctgcgggcgtcccgctgcccgacatgccggaatcaccgggaatttcgaccggctgatagaacacgctgtcatccaagtcggaggccacggacgaacggatgtcatcagaaatcagactttgatagctgggttcggtggatacggggatgatggcacgcgagttggtatcacgactccacaaatacacacctatcaggttggagggcccctcggattgcaacgaggacgccaagtcattgaccagctgctggatctgcactgtggcggagacatcggccgcgtccagactggtttgggcctgctgcaccatgtttgaatagtcggcacgcgactgcgaagtgatttgggtaagcagcgaggcgcgcactgataccatcgatacgccagagaagacgatggccacggccagtgtaagaatcacggtgagggccacggtgcgggcctgcagcgagcgacgaacttcagcgcgtccgtggcgcagcaagcgtttgaggctgaatcgagggcgcaggttcattgttcaggagtgacgaacttgtagccgatgccacgtacggtctgcacgatttgcgggttctcggggtcgtcctccactttggccctaaggcgttgaacatgcacattgaccaggcgcgtatcgccggaattctcgtatccccagacattcttgagcaggctggaacgactgatggcctcgccggcggcggccgcaagcatgaacagcagctcgaattccatcggagtaagattcaggtccttgccatccttggtggcggtgtgttccaaacggtcgatgacgatggatccgcgttccagatggttgacgtttgcattgccaccgcttgcgccaccggtggcaccgtcttcggcggccggcttggcgatgcggaagcgtgcatggatacgcgccagcaattcggccactttgaagggcttgggcacgtagtcgtcggccccggcttccaagccggccacgacgtcaagtgtgtctgatttggcggtgagcatgataatcggcacattagaggtagctctgatgcggcgggccacccccgtgccgtccagcccggggagcataacgtcaagcagaatcaaatcgggcttgacgatggggaacatttccacagccctcagcccgtccaggcaggtcacggtctggaatccctcgttttccaaaacaagactaagcatttcgccgatggcctgatcgtcgtccacgatgaagatggtcgccatggtgtttgtcttccctttcccactgttattgttgcgttacactttactcccctatgttcatttctgttcgggttccccgccatgcaacatcgggcgaatcttggcaagacgctggctgacttcgtgttcgtagccgcgatcgttgggatggtagtactcggtgccacgcagctcttcgggcatatattcctgtggcgccacggcaccgggccaatcgtgcgcatacttgtagccctcgtggttgccccactctttcataagcttggtgggggcgttcctcaaatacagcggaacagcgccgatcttgccggcatccacgtccgcgagcgcctggttaatggcgttatagctggcgtttgatttgggcgcggtggccacggcaatcgtagcttcggccaaaataatacgtgcctcgggcatgccgaccagcgccacggcctgcgccgcggccacggtgacctgcaaaatctgcggggcggccatgccgacttcctcgctggcggcgatcatgatgcgacgggcgatgaagcgcggatcttcacccgctttcagcatgcgtgccagataatggatggcggcatccggatcggagccccgcatggatttgatgaatgcggaaatcacgtcgtaatggtcatcgccgtctttgtcgtagcgcacggtggcggtgtccattaccgtagccacgatttcgggggtgatgatgggtcggcgtgcgccctttttgcgggcttcgtcgccagtgaccgcgccagccgcggcctccagaatcgtgagactcttgcgtgcgtcaccaccggccatgcgcacgatgtcggcgatggcttcgtccgtggctttgacctcgcccctgagaccgcggtcatcagtcagcgcgcgctgcaccagttcgatgagctgatcaggctccaatgactcaagcttgacgaccaccgaacgggagagcaacggtttgatgatggaaaagctcgggttctcggtggtggcgccgataaaggtcacgtcgcggttttcgacggcgggaagcagcgcatcctgctgggatttggagaagcgatgtacctcgtcgatgaacagtacggtttcctggccgcgtgacacgagccgttcgtgagcgcgggtgagtacgtcgcgcacgtctttgacgccggatgtcacggcggagagttcctcaaacacgcggccggattggccggccacgatggtggcgagcgtggttttgccgacgcctggagggccgaacaggattacggagctcggcgcggtgagactgcctttgctggccggattggcgaggcggcgcagcggcgagccctggcccaacacctgcgtttggccaatcacctcgtccaaagtgcgtggacgcatgcgcaccgccaacggccgcgtcatcgactccggcgcatcagccgccccaaacaaatcgttctcactcataacgtcctatagtaccccagtgttcgaacagacgttcgagctgcaccctggcttccctcagagaggggagccaagaaaggaatcagttactcaccttgtagtcgtggaagactacttcgccggtgtcttgggtggcgtcgaggtccacgatgccttcgatggcccagtcgtggtcgccatcggaatcatcgataatctgacgcaccttccacgtatgctcgtcgttctcgtgcttgtcatccaacatgaacagttcgggcgagcgcgcttcggcgccgatgcccacgtactcgtgctcgtcgtagtagtcgtcgagcacatcttcccattcgtgcacaccgtagccccagtctttgtcgagcgcgccgagcttgtccggctggtcgaggtccataagctgcacacggcggaacatggcgtttctgatcagcacgataaggcctcgtcggtcctcgaccaccgcgttcttcttgcccggcgccgccaaggaggccgccgcctcggactggtcggcggaatcgccggcgttctcccattcatccaccagcgaggagtcgatggagcgcacgagcacgcgcagccaggagatgatgtcttcgagttgctcgtcacgcttttcgggcggcacggtgcgcgccagcgtgcggtaggcgtccgagaggtagcgcaacagggtgccttcggagcgggcgatgttgtatcgggtgatgtatccggtgaagtcggaggcggtttccaccatgtcgcgcaccacggatttcggcgacagccagtagtcgttggcccacggcacatcgtggcggtactgatcgaacgcggcttcgagcatgtcttccagtggcttcggatacgtaatctcctgcagcttatccatacgctcgtcatagtcgagtccgtcggccttcatatcggccatcgccttgtctcgggcctgacgctcctgggcacgcagcacctgcttggggtcttcgagcgtggcctcggccatggagatcacgtccagcgcataggtgtcggactcggggtcgagcagttcgagcgcggccagcaggaacggggagagcggctggtcgagggcgaagtcgtccggcatatcaagggtcatgtagtagtccttgccgccgtccttgcggtcctcggtttcgatgacttcggtatcgaacagggtttggaagatctcgtcggcccgctggtgcagatgctccttctggtcgggggtctgcgcggaatcgtcgatgagatcgtcgatacgggcacgggcgtcaccgccctgcgccacttcattgagcaccatcgaatgcgtgattttcaggtgcgggaccagggtctccggttcagcgtcgatgagcttatcaaacgtgctctggttccaggtcacaaaaccttccggcgccttcttgcgcttgaccttcttgagtttcttcggatctccaccggccttggcgatggctttctggttttcgatttcatattcgggagcctcggcgatcaccagtccctcggtatcgaatcccatacggccagctcgtccggcaatctggtggaattcgcgggcgcgcaggcggcgcatcttggtgccgtcgaacttggtcagggccgtgagcaccacggagtgaatcggcacattgatgccgacgcccaatgtatcggtgccgcaaatcaccggcagcagaccctgctgggcgagctgttcgaccaggcggcggtagcgaggcagcatgccggcatgatggatgccgacaccggtgcgcagcagtcgctgcagaatcttgccgaaggctgtggtgaacttgacgcctttgatggcttctgcgatggcttggcgctgttccttgctggatacaccggtggaggcgagcgcttgcgcggtctccaatgcggcgtcctgcgaaaagtggaccacgtaaatcggggtttcgccgttgcggaaggcgagttccacggttttttccatcgggtcgagcgtgtattcgtagctcaacggcaccggtcgcggcgcgtcggcgattacatccacgtccggggtgtcgttcagatcggagagcttgtcggcgatggcgtccacattgccgagcgtggcgctcatcagcaggaactgggtctgcggcagcgtgagcagtggcacctgccacgcccagccgcgctccggatcaccgtaataatggaattcgtccatcgccacgaggcccacatcggcatgggtgccttcgcgcaaagcctgattggcgaggatttcggcggtgcagcagatgatcggcgcgtccgcgttgatgtggctgtcaccggtgatcatgccgacattgtcgcggccgaacacttcgaccaagtcgaagaatttctccgacaccagcgccttgatcggagcggtgtaataggagcggcggccagtgcatagggcggcgaagtgcatgccgagcgccaccagcgatttgcccgaaccggtcggggtattcaaaatcacatggtcgccggccaagaggtccataatggcctcttcctgatgcggccacggctcgatgcccttgacgtcttccacccagccgaagaaccgttcgtagatgtcgtcggccgtaagattccgttcgcgtccgtcgccgtcccattcgggggccagccgccccagggatccgtattccttctcgtcagtcataatgctcagtctacctagtggcctattccgacggcacgagccgccctccgtcgctatgcgacgcctcccgccagcgggcggagccatgcgaagagctgtgccatgcgcttggctccgccaatgggaggatcgctcacgccaaccggcggcgcacctcgtcggggtccacctcgggttcgaggggaggccaggtcatgttcatgttcttcaaggtggtgcgcagcagttcggagaccacggctcgcgaataccagcggttatcggccggaacgaggtaccacggtgcggcggccgtgctggttttctcgaacacttcctgccaagcgaacatgtactcatcccatcggtcgcgggcctcgaggtcggagatatcgaatttccagaacttggtgggatcatccagcctcccgaggaagtgttttttctgttcttcctggcttaccacgaggaagatcttgaggatggcgcatccgctggcggccagttcacgttcgaaatcgttgatctggtcgtagcgggcacgccatacgtcttcgggataggtgccatagacgtgcggcatgaccacatcttcataatgggagcggtcgaatacggcaatccaccccggcttgggcaattcacgcttcacacgccagaggaagtcgtggtcgagctcctcggccgcaggcttgccgaagccatggtaatggatgcccatcgggtcaccttggctgaacacgtgacgcacgatgccgcccttgccggaggcatccatgccttgcagcacgatgagcagccgccgtgtcgagcctttgacgccattcgcgtacatgagccgctggtatcgggcgatttcggaggagctgatcgaaatgaacttctcggcgtcctctttattgccgtcgaatccgggagtggaatcgccttcgacatcagtgacctgcatgccgtggtggaacataagacgttgagcgggcggcaacgaccatacggcgctgagcagttcactggatttcgccgcacgtgccagtcgttcaggcacgctggcactggagtcgatggtgtctatgcgatccgccgcgagctgtaataccttgtcgatccggcgatcggttttgtattcctttcccttgccgttcttgttgttctttcctgaggattttccggctgtaccccacttgccggcctcttcaggcttgttggttctgtcgtcgtccttggccatgctcccgattgtacgtcttgtaactcaggagacccagcaacgtagcgacattcacattccacttgttactgcaaatctataggcatgcagtcgttcggaccgtaattgttggctttgcaccaattccaagcctcatccgtcgagtcgaagccctcaccggcaagaatcacatagtatttgtcggaattgctgctgtaggtgggccagtcacccgaccagataagcagtacgtttgacttcttgttgtgcatcgtgatgaattgcgcaagaatatcgtggtagttccaggtcttgccttcagcttccatgcccttgcgcttgctggacaactgcgcggtatacgtggaatagacccgaaaaatcgaacacggcatcggccacgacattatcgtcgctgtcctgcaacgtgagtcgggtggccgaatcattgaatttcgtggatgcgttcttatcatcacaattcgaagtggccagaatcgtgactatcagattgcgctcgctcttgatcgaggagactttcatatcgggagcggcatcgcaggttttggcaggctttgccttgtcggggtcgatgtatgccaccagatatccgccggctttgatgacggtgtccgtattcgttacttcgctggcgccgatggtgtagtgcttcttggctttcttgccgctgtcgtagatgccccagcccttcacgtcaacgtctgtggagccggtgttcttgagctcggcccaatcgcaacgcttgctatccgggtctccggcagctttcgtattgccggcatagacctcgttgatgattacggatggtttggcagccgtgttctgttcggcagtggtctgctgctcgtccgcagtcgcagcgggcacgccgatcagggcgatgctgctcagtgtcaccgcagcggtgagcagcgcgactgaactttggctgaattactgctgaagctggttcttggatttgcgtcgaaccgtccgtattccgccgataatcgcgattacagcggtaccgatagctacgctgatcaacgccggtcgttgcgcggcatggagggtggcgagatccggtccggccgcaatggcactgttttcacccgccgagctatccgacgccgggtgattgcccgcgtcggtgtactgggcattgaccacactcgggccggtaagcgccacttggtcggcggtctcgaccttggccacatcgccgtgcttatccaaggtgacgcgggcgcacagggctttggcccagttgatacgctgccagccgtcgctcgattgccatagggggtatccggaatccaaggcagtggctttcaaaatcgcgttgcgctgatcggcgtgcagttcgggataggccagtcgcagcacgtccgccgccccgcgcggtgccatgaaatcagcgccggactgggcggtgtcttgcgggaaggtgtaggtcaggcgtgcggtgtagacgcgcacggccgaggcctggtccgcgaccggctcggtggccaccgggtccagaaaatcgttggtgtagccgcccgaaccggaggccttggtgttggcgatgcaggcggcgagggtagtgccgtggccgtccgcggcgcagcgggacaccagatagtcccgcagctgccgggacgcgggcacgatggacgaagcgaattcgttatgccagtactgcccgttctgggcggatgcgccaatgcgcccgcccatgatgtcaagcggataatgcacgccgagcacgatgcggttgttgccggcctccgaagtgcgggccatgatttgcggcgcgagttcgggaatcatgccggccagcgcgataccccacgaataggcgccggtagtgtggccggaggggtaggaactgtttttctgcaagttcgagtagccgggcacgtgttcgagccatgagggtgattgcttgatgtcaagcgtggcgggcagtccggcgagatcgttagtgccgccgtagctgctttccgcacggttcagataggggcgcggatgcatggccgcacgttttgaggcgtaggtggaggccacgttaaaggagaagatatcggcgacggcgttgagtttcccggatttgagcccttcgctcatatatttgccaagcaccggaccgagcgcgtccggcatggcttcctcggcttgcagatcggagtcgacgagcgcacgcttgcgttgggcgttcaggccatccttatcgagattttcggcggctttgtggttaatggccacggccaaatcttcgtcgagtttcattgtatcggcgtcgagcaccttgccaccgtgttcggcatcggtgggggcctgccaatagttcttttcgtagtcggagagcaatgccacccaatccgggttgggcagctggtcggcctgtgcgattgcaggcgtcgcggctagcgtggccgccaacgccagcggcgcaatggtcgcaatagcaaaaacggaggataggtgccggaacatcttcatatgttccaacctatcctccgtgaaggctacgtagccggagcccagtcaaacactcagtaaattcttcgtgccggcttagcggcgattgagctgactgtcaggcctctggcttgtcctcaggcttttgagactcctggaattcgccggtttccgggtcaacctgtgactcgggctgggtggcgtcatatccctgttcgtagcgggtgcgccgccagttgcgaatcgaggcgttggtgccacggtgatgcacatggtatttgcgcggcgtaccgcccagcggcagctcttcgacctccttggccacagcgatctggttgacattggacgggtcgccggcggcgatcggcgccagcggctcgggttcggcgggtgcggccgtacgctgctgcatgcgcgagggcagccattcggcgagcctcgacaacagccagcaggcgatgaagtaaatcaccgcggccatgaccagcgtctgcaggatgttgaagtacatcgagccgagtcggcgcgattcctgcagcaggtcggtatacatgatgatcgagcctagggcggtatccttcaacaccacgaccagctgggtgacggcggccggcagcatggcgtagacggcctgcggcacctcgatctccatcagcgactgcgtttcggtcaggcccaaagcgagcgaggcctcacgctggccgcccggcagattgccgacgccggagcgcaccagttcggcgaccaccgaaccgttgtacagcaccaaggccagcaccacggcccaataggacgggctgggcaggcccgcgaacgcgaaccatcgccagaagaagatcatgagcagcagcacgggaaccgcacggcagaactcgacgatcacggcggagacgccacgtaccaacgggttcggcagcagtcggcccacgccgaacaccaggccgaacaccacggcacccaccacggccacgatggtggccttgatggtcatccacagtccgggcaggtagaagtcggtccacgcctctcgttcgacggcgggcttccacagctcccagctgagctggttctcgccgtccggcgggttgtgcaggcgcatgaggataagcacgagcaccaccgcgaacagaatgcccgcgatccagttgacgatgcgaatggtgcgccggcccttgggaccgggcgcgtcgaacagcacggaattcgaagtatcggccatatccgtcacctccttacggcgagtttgttggacaggtacgtggtgagcatgccgatggggatgatcaggatcacgtagccgagcgcgaagatcaggaagatttggatgatcacgtcgggacggaattcgatcatctcgctcatcagcgaggatgtttcggtggccacggatgcggcggcggccacggtggagttcttgagcagggcgatcagcgtgttgccgagcggtgccacggagcctcggaaggcctgcggcagaatgatctcggtggcggactgcatgaagcccaagcccagcgctcgtgcggcctcggcctggccaatcggcacggtgttgatgcccgaacgcagagattcgcacacgaacgccgccgtgtacaggctcaggccggtgaccgcgagccagaagaagttcgtggtgaaggtgtcggagaagctgagcttcagctgcgcgtaggcacccagcaccatgaacaccatgatgatggtcagcggcaggttcttgaacagttccacatacgcaccggccacggccctgagtgaggaaatcggcgagatgcgcatcaccacaaggatcacgccgaggatcagggagaacagggcggaccacaaggtcagttcgatattgaccagaaacgcgccgagcacgtcatactggctgaagagttccaggaatccgctcatcaggcctcctctccttcgtccgggatgggcgggttgtagcgtacgtcgggcgtgtagttggtgcccttggtgttatcgctgatggcgttctcccacgagccgtcctgaatcatgtccacgatggcgttgttgattttggtggccagctgcgtatcgcccttcttgatgcccacgccgtagtattcctgcgtgaacggtttgccaaccaccttgagcttgccgcgcgaggcggaggccaggccggccaggatgatgtcatcggtggttaccgcgtccacgatgccggagaacagggcggtggcgcattcggcgtaaccgggctgttccatgagctggacttcggaggcgaacttctccttgacggtggcggccgaggtcgaaccggtgacggagcataggcgcttgccgttcaggtcttcggggccgttgatggagttgtcgtccttgcgcacgagcagatcctgtccggccacgaagtacgggccagcgaaggagacggccttcttgcgctcgtcggtgatggagtaggtggcgaggatcatgtccacgtcgccgttctgaatcatggcctcacgctgcttggagggggcttccttccagatgatctggtcttcggaatagccgagtttcttggcgacgtatttggccacgtccacgtcgaagcccacgtaggtgccggacttcttgaagcccaggccaggctggtcgaatttgatgccgatgcggatcttgccggtttcgtccgcgccgcaggctgccagcgacattgtgcaggccacggcggcgagcgcggcgatcacgcggcaagccttccgtttgaacgtattggtgaatgtcattggattgcgtacccgtctttcagtgggttcgtcagtgggtgaggatcttcgagaggaagtccttggcacggtcggtctgcggatgctcgaagaactcgtcgggcgtgttctcttcgagaatctggccgtccgccatgaagacgatgcggtcggcggccttgcgcgcgaaacccatctcgtgggtcacgcagatcatcgtcatgccttcatgcgcgagttcgaccatcacgtcgagcacttcgttgaccatttccgggtcgagtgcggaagtgggctcgtcgaacagcatgaccttggggcgcatggcgagcgcgcgggcgatggccacacgctgctgctggccaccggagagctgggagggcatcttgctggcctgggagtcgacgcccacgcgggcgagcaggtccatggccagttgctcggcttccttcttgtccatgtgacgcaccttgatgagggccagcgtcacgttttcaagaatggttttgttggcgaacaggttgaacgactggaacaccatgccaacttcggccctgaggttcgcgagctccttgccttcctgtggcaggggcttgccgtcgatgcggatgtcgccggaatcgatggtctcgaggcgattgatggtgcggcacatcgtggacttgcctgagccggacgggcccacgaccaccagcacctcacccttggcgacggtcaggttgatgtccttgaggacgtgcaaagcaccgaagtgcttttcgacgtgggtcagttcgactagcggacggttcgggtcctctttgccgggaaccagcggggtcaatttggccttgcttggcgatgttgtgcttgtcgcgcgcgaacgcactactgtttcattgttcgtttcagacatgagtgggaggatagcacaccgacgtttccaacgtgttcacagtatgtccacacagttgctcagtcgatgtctcatttccgcatcagacatcgtgatggcggcattgggcatcggcatacattctcgctgagtcgcgcatcgctcggcgtctgctgtgcgctgattgcctgctgcgtggtggctgagacgttgctgcgacggcaaagcgggcacgtgttgtcctatctgctgattccatgtttggccttggtgtcgttggcgttgctgccgtgtatgccgcagtcgggcgcatggctggcggtcactttgtattgtgtggggctggtctcgccgtttcccatgtcgtattcgtataaatgcgctaggcattttgagcgtggctagctgttcgcacacgatgagtgctgttatacggtggacgacactcccgaagcgcggtggataaccgggcgcggcacacgatatgccggtggataaccggttcgcgccgcttaagttatccccatttttcggttttgcccctgtgccaccgtggaatgcgctacgctcggcgcatgaacggatacagcgaagtgccgcacaatggcgaaatcaacaactatctgcgcaaagatcttgacgccaaagccacggccaagaacacggcctgttggaatctgctgggcaaagtgcgcacgaaacgcacgttgtgtttctcgctgtataccgcattggaattatgcggcgtggagttgccgaggcacagcacgttgccgcagaaggatttttatgtgacggtgaggagcaaggggacccgctcttcattggacaatgtcgactatcgcatatggaatgcaaagttcaacagtatcgctttctcaaacggcgtaacctgcatgcatcccatggatgcgtggatacagtttgcccaatatctcaacctcactgaattagtggtgctggctgaagcgctcatcagacgttatggatatgccattgaacaattcactcaacgactaacggcctttcaccgcgttattggccgtgcgcgttgtgaggcggcgctgaagctcgtaaaaccatcggattccgttcaggaaactcgtacacgcttggcgcttatgcttttcggcctgcccataccgcaaacacaatatggcattaccgattcagagaacggatacacctacaccgttgacatggcttatccacaatacaaagtcgctattgaatatgatggcgatcatcaccgtcgcttccgcaaacaatatgtgcgggaccagcaaaaacgtcgacgtctgcggcaattgggctggaccgtcatcgaggtgttcgccgatgacctgtggaacaccgccaaacaacgtgccttcgcacaagaggttgccaccgcgatgcaaataccgcttcctggccgtcctcaaccttcatgccgggtattaatagacggcagccttaccatcaatgcgcgcaaaggggaatacaggaggcggaaacaagcaaaacacaacaaagcatcacaacattgatcaaatacggagttgcgatcgctcctcatggggcggtaatttgcccatggggcggtttgaagaaattgtgaaaccgcggaattaagccattttgacctaccgccccatggggttttcaccgccccatgggttgtttaccgccccatgaggaagttaccgccccatggaaggataatcggcaaacgccaagggggacaccgcatggtgcgaggtttgccgcatggcggaggtgccatcgggcggagtatttggcaccccttggcaggtatttggcacattgggccccacccgcaaaaagcaaatggcccttggaattattccaagggccatttgcggctaatagcaccggagcattactcctcgaaaattaatctacgcgtgcggagaccgccgtccgaagccgaaggcgcactgaagtacgtcgagtgctgaggaaaagcggtatacgctccgtagattagttttcgtcggcgtccgggtcgtagtcgacgccagtctcggcgcgctgctcgtcggaaatcggggccggagcaccggtcagcgggtcgcggccgccgccggccttcgggaaggcgatgacgtcgcggatggagtctgcaccggccaggatggacacggtgcggtcccaaccgagggccagacccgcgtgaggcggagcgccgtacttgaatgcctcaagcaggaagccgaacttctcgtcggcctcttccttggtgatgcccagcacatcgagcacacgggcttggatgtcgtcgcggtggatacgtacggaaccgccgcccatctcctcaccgttgcagacgatgtcgtaggagtcggacatggcgtgctcgggatccttgtcgaacttgtcgatccaatccttggaaggcatggtgaacgggtggtgcatggaggtccacttggagtggccgacagccacatcgtcatcatccggatcgtcggtgggcttgaacagcgggaagtccacaacccaagtgaaagcgaacttcttcggatccagcaggccttcgcgggaggcgagctccacacgcacggcacccagcagcagctgggctgactcgcgggaaccggcggcgaagaacacggcgtcgccttcctcggcaccgacggcctcgcgtaggccgttgcgctcctcatcggataggttcttggcgacggggcccttgagctcgccgttttcgccgaagaccacgtaagcaaggcccttggctccacgctgacgagcccaatcctgccaagcgtcgaactgacgacgcggcgtggcggcaccgcccttgaagaccacggcacccacgtacggggcctggaacacgcggaacggcgtgttcttgaagtactcggtcagctccaccagcgggttgccgaagcgcaggtccggcttgtcggagccgtacttgtccatcgcatccttccaggtgatgcgcggcagcggcagctggacctcatagccggcggacttccagatggcggcgatgaccttctcagtcatggccatcacatcttcctggtccacgtaggccatttccatatcgagctgggtgaactcgggctgacggtcggcgcggaagtcctcatcacggtagcagcgggcgagctggtagtaacgctcgacaccggagaccatgagcagctgcttgaggagctgcggggactgcggcagggcgtaccaggaaccgggaaccagacgggccggcaccacgaagtcgcgggcgccttccggggtggacttaatgaaggtcggggtctcgacctcggtgaagtccatgtcttccagcgcgtggcgggcggccttagccatgtcggaacgcagcttcagattgtactgcatggacgggcggcgcaggtcgaggtaacggtacttcagacgcacgtcctcgccaggcagcttgttctcggactcattctcaagagcggtggaaacctggaacggcagggcgtcggacttggcgaggatctcgatggtctcggccacaacctcgatcttgccggtggccagatgggtgttctcgttgccatccgggcgcaggcgcacttcgccggtaatctgaatcacgaattcgctgcgcagcgggcgggccatatcctcgtcgtaaatgacgacctgcacgaggccggtcgaatcacgaaggtcgatgaaggccacgccaccgtgatcacggcgtcggtcaacccaaccggcgagggtgaccttctggccgaccagggcctcggtcacttcagtggcatgatgtgttctgtaagccgtctggctcattgtcttgtttctcctcgatttttcgcgcgaatacgtcagatttcgacggtttgctgggcaaccacagtatccggctcccacgacgtgcaatcggcggcaacctgctcgcccgtgacgatgttcttgacctcgtcgccagcgggctctgcgccttccgcaccttcggcagcggtggccgggaaccacacgtacggaatgccgagtttgtccgcgtacttgatctgcttgccgagcttggccgcggtgggtgccacgtcagtagcgatgccgcgcgcacgcagttggttcgcaatacgattggcggccgggcggtcctcttcattccacacagcgaccagcacggcggccgggctgacacggctggcgtgagcgccggcggtgtgcagcatgtagctgaccagtcggctcaggccgatggacaggcccacgcccgggtacttgcggttgccctgggaagcgagattgtcgtaacgaccaccggagcagatggagccgagtgatgcggcaccgtcgaggaaggtctcgtagacggaaccggtgtagtagtcgagaccgcgggcgatcttcaggtcggcgatgacggaaccggggcggatggcggcggcttcgtcgacgatcatggccagggtatcgagtccctgacgagccagcgtgtaggactcggaatccttgacgatgccgtgagcctcgcacagcgcatcgaacttggcggcaagctcggcaccatcggaggcggtgagctcggccaattcgaggcaggcgcgcgcctgtgcttcggtggcgccgcaggtctcggtgagcagtcgggccacctcatcggcaccgatcttgtcgagcttgtcgatctcgcgcagcacgccttcgacgtccgtcaggccaaggccacggtagaacccctcagacaacttgcggttattggcgtgcacggtggccttggggaggccatacgcgcgcagctcttccagtgcggagaccatgaccagcggcagttccacttcatagtggtcgggcaggtcgccggcgccgatcacgtcgatgtcggcctgtacgaactcgcggaagcggccttcctgcggacgctcgccacgccacaccttctgaatctgccagcgcttgaacgggaacgccaacgcacccgagtgctcgaccacataccggctcagcggcacggtcagatcgaaatgcaggcccaaacgctcttcaatcggagtgtcggattcatgaccgacctcctgcaaacggctcagcaggtaaatctccttgctggtctcgccttttttcagcaaagaagcgccggtttccaccgctcgcgtctcaatgccgatgaagccgttgagctcaaaaaccttacgaagcgtatcgataacacgctgctccacaacacgttcggaggggagccactccgggaatcctgatattgatgcacctttagccacgaaatcaatataataggtgagggttgcgtcaaaacttcctggttcgcccgggatgggagacgctcccgcttatgcattctacgctttaaggagctggccatggccgacgaaactgtcaccgaacccgtaaacaccgctgcgcccgaagagcaggcaacgacacccgcacccgaggccagcgcggccacgccggcgccgactccgtcccccgcttccatgccgaaaccgcacgcgccctcccccgccgccttcgccaagaagactccggcgaccaagccgcgcgctgccgccccggccgccgccaccgccgcctattccgaggctgatgtcaaggccgccgaggccttcggccgcgtggatgacaacggcaccgtcttcgtcaaggatggcgacgccgagcgcgaggtgggccagttcccggatgtctccaaggaagaggcgttggcactgtacgcccgtcgtttcctggatctcaaggccaagctcgatctgttggccacccgtctggcttccccgaacatcaaggcccgtgaaatcgacgaatccgtgaagctcttgggtgaagaaacctccgagccggccgtcgtgggcgatcttgccgcactcaaggcccagtacgaggagctgaaggccgccggcgaggccaagaagaccgaaatcgccgaggcacgcaaggccgctcaggccaaggccgttgccgagcgcaccgccattgtcgagaaggctgaagcactggccgcttctctgggcgacaacaccaactggcgctccaccgccgacaagttccgtaacctgttcgacgagtggcagaaccaccagcgcaccaccgtgcgcatcgacaagccggaggccgaggcgctgtggaagcgcttctccgccgcccgtaccaccttcaaccaggctcgccgcaagtgggctcaggctcgcgacaacgagcgcacggccgccaaggaagccaaggaagcgattatcgccgaggccaatgagctcaaggattccaccgcttggggtgagacttcccgcaagttcaacgatctgatggaccgttggaagaaggccggccgcgccggccgtaacgaggacgacgagctgtgggccaagttccgcgaagccgccgacaccttcttcaacgctcgtcaggccgatcgcgatcagatcaactcctccgagaaggagaatctggctgccaaggaggctctgctggtcaaggccgaggctctggtgccggtgaagaccgacgccgaggccaagaaggcccgccaggagctggccaagattcaggaagagtgggatcagatcggttacgtgccgcgtgacgatatgcgccgcatcgagaaccgtctcgacgccgttgacaagcagatcaaggccatcgaggatgccgcttggaagcagaccgatccggaggccgacgcccgcaagtccagcttcgaggagcagctcaacgcccagctcgccgagctcgacgccgagatcgcggccgaatccgacccgaagaagaaggccaagctcgaagccgagaaggccaccaaggagcagtggctgaacgccatcaagtaagggtctcgccaggtgcccctcagagaggggagctggcagcaaggctgactgaggggagtttacggttataccgcaagctcccctcagtcgcctacggcgacagctcccctcagcgaggggagcgtcgtcatatttatgccgttttctcctgccctatactcataacttcaccccatagttcctcagtcccccagcaattggtgtcttacgcctgagtccctaccggtactgcaacaactgccgtgagcccttgatgtgcggccagatattcatgcaacggctggctgtatggcatatccagctcgccgtaattggttccggcacggaaggcggggtaactgtcgccgccctgaagcagatatgaattggacgcgataatcaccaggtcatcgtccgcaatcggtcggccgtcaacggcgaggttcgcgatacgaaccgccgcatgttcgtcggcagcacactcgtcagcgtcagcgttggtatcagcgccggaatcagtatcaacgccggcatcggcattgccgctctcaccagccgtaccgcattcggcataccgatacgtcacgttcgaggagatgccgagccagcgccgctccagtcgcccatcgtcacggcgaaattgctcggcgagcactctcttcacatcgcgcccggtgagcgtctcatgcgcggccttgaactgcaaggccatgagactatccacctcgcgcacggtgactttgccatcgccattcatatcaagccgtggagtccgcagactgccattattcgaaaatccgattaccggcaagcgattcccggcatacacatgcttcatgattgactctcggttcgcgtccgccaccagcacaccgaccgtattcccgtgcttgtccgaaccttgtttgtcgaaattcacgccggaggccaaggtgccaatcaccgcgctgccggtatggttcgcatatgttgccgacgcctggtaaatatgctgcgcgcgcgatacctcatcgttctcctcagcaccggcagacatccaagcggcttgcgccggatgcgcattaagcccatccacgcccagcacgccgtcaaccgccgtatggctggtgccattgccgaggtcaacgtcggccactcgcaccgtggcgcgacgcccggcaccggtgatgatcaaatcctgcacggccatgttccgcccgaagctgcccgcctcgtaaataggcgcgccacccgcggttgtaccgtgcttgatcgcgtgactgtgaccggtgtataccacatcaacatctcgcccaatatcggcggcggctgaagcatcggcatgcagcaaggccaccaccgcatccacctttccggagcgcttgagttcacgggccacacgattgatcgcgtccaccgcccgttcgtcaaggtcggtatcacgagtgatctgcggagtggccaccgagccgagcgcatcagtaagggcgcccacgaaaccgatccgcttgccgttcaccgttcgaatcgtagagtcacgtacgtggcccagcagtccgtcaggcgacttattggcggcagacgcgttggcgcacagccagtcgatgccgttgctgggatcagcgatacgattgttgaaatcggcgacaccgcggtcgaactcatggttgcctatcgccgaaatcgtcaatccccacgctttggccatatccagcgtgggttggtccttctccaccgccgactcatacggggagcctcccaccaaatcgccggtcgataccggaatcatattgccgggattatggctgtcggccacggtgaaggcggtggcgttgtctgcaccacgttcgatatgcccgtgaaaatcagtgatgtcggcgatggtcaccgtacgggtgccggaagatggattatcgccggaaaaaggaacggctcccgtggttcccgcacaagcataaggaaccaccagagccgtaaggataagcgctactgcaccaaaagcgatccccgatcgcttgccggtccaccgccggttcttcatattcctgctcacaccagtcacgctaggatcgtcgattgaacggccatgcctaggaaggcgactctcaggtgaattcttagcggcgtcttgggatgggaaaggcctgaccccgtactatcagggtcaggcctttgcaacccgtgtcactacgaatgcgtcggcaaggggagattactcggcaaattcctcgacgcagatctcagctaccgcatccacgcacgcctcggcaatcaggcggccgcacgctgtttacccgcgaggagaccatcgacaccggactcgccctactgcaataatccgacacaaacagtagctccccttgacaggggagctccgcaactacttatatgcgctactcctgcgcagcgtcgccagaatcgtcagcgtgcacgggtgcggcttcggacgaagtttcggcatcgttggcggcaccggcttcggcgggcttatcggcgacggccggctcctcgaacttctcccccttgaaggtgaattcgccgaggataccctcgccttccgcatccacaatcacgcgctgaccgtcttcgagatcgcccatcaggatcttctcggagatggcgtcctcgatgtcgcgctgaatcacgcggcgcagcggacgggcaccgagcagcgggtcgaagcccttctgcgcgagcaggtccttggcggcgtcggtgagttcgagcgacatatgacggtcgaacaggcggtcgttgagctgcttgacgtccagatccacgatctggcgcacctgcggctcggtgagctgcttgaagacgatgatgtcgtccagacggttcaggaactccgggcggaactgctgcttcaattcggagctgacctggtccttcatgcgctggtagctggactcgttgttggcacctaggttgaagcccgtgttggcggccttggcgatgtctcgcgtaccgaggttggtggtcaggatgatgatggtgttcttaaagtccaccttgcggccctgaccgtcggtcaggtggccgtcatcgagcacctgcagcaacgtgttgaagatgtccggatgagccttttcgatctcgtcgaacagcaccacggagaacggcttgcggcgcaccttttcggtgagctcgccgccttcctcgtagccgacgtatcccggaggcgcaccgaagagtcgcgaagccgcgtacttctcggagaactcggacatatccacgcgaatcagcgcgtcctcatcgtcgaacaggaattcggcgagcgtcttggccagctcggtcttgccgacgccggtggggccggcgaagatgaacgaaccggacgggcgcttcgggtccttcagacccacgcgagtacggcggatagagcgggacagggcggaaaccgcctcgtcctggccgatgatgcgcttgtgcagttcggcttccatgttgagcagtttcttggactcggcctgagtcagcttgaacaccgggataccggtggtggagctgatgacctcggcgatcacgtcctcgtccacgaccatcttgacgtcggactcgccttcgcgccaggagtcttccttctgcttgcgatcggcttccagcttctcctgcttgtcgcgcagttcggcggccttctcgaagtcctggcccttgatggcctcgtccttgtcggcggcgatcttggcgatcttctcgtcgagttccttgagctcaggcggggcggtcaggcgcttgatgcgcaggcgtgcaccggcctcatcgatcaggtcgatggccttgtcaggcaggttacggtcctggatgtaccggctggacagctctgcggcagactgcagcgcgccatcggtgatggtcacgtggtggtggttctcgtaacgggaacgcaggcccttcaggatctcgatggtctcggcgatggtcggctcgtgcacctgaatcggctggaaacggcgttccagagccgcgtccttctcgatgtacttgcggtactcgtcggtggtggtggcaccaatggtctggagctcgccacgggccagcatcggcttcaacatgtcggaggcacccagcgcgccgtcagccgagccggcgcccacgatggtgtgaatctcgtcgatgaacagcacgatgtcgccacgagtcttgatttccttcagcaccttcttcaggcgctcctcgaaatcaccacggtagcgggagccggccaccatggaaccgaggtccagcgagtagacctgcttgcccttcagggtttccggcacgtcgccggcttggatcttctgggccaagccttcgaccacagcggtcttgcccacgccgggctcgccgatcagcaccgggttgttcttggtgcggcgggaaagcacgaccataacgcgctcaatctcgttggtacggccgatgaccgggtccagcttgccttcagcggcttcggcggtcaggttgcggccgaactgatcgaggatggcggaaccggacttgttctgcttgtccgtcacgccgccggcgttggccaagtcgcccttgccgtcaccggtgccggtgccggagttgccgcgaatcatatcgatggtcgcgctacgcaactcgcccagatcgacgtccatcttgatgagcacctgggtgcccacgccttcgccttcgcgaatcaggccgagcaggatgtgctcggtgccgatgtagctgtggcccagctgcagggcttcacgcagcgaaaactccaacacctgcttggcgtgcggagtaaaggggatgtgcccgttcggagccgcgttgcccttgccgatcatttcttcaacctgcttgcgggtggcatccagctccacgcccttcgaggcgagtgccttggcggctacaccctcaccttcgcggatcaggccgagcagcaggtgttcggtgccgatgtagttgtgctgaagggccctcgcctcttcctgcgccaacacgatcacgcgccgtgcacggtcggtaaaccgttcgaacatgcttgtccttcctcaattgacattccgtcctactctaccgattcacgatgacgtttattcatgagattccacgaattgcgccgtgagaggagaagaaaacgatatgctggttcttagattcacccgtagtcgattacaaggaggctcgaaatgagtgaagctgcaaccaagcccgacatcgttgtcggtgtggatggttccgatgaatcctttgccgcgctgaagtgggcgcttgaggaggcctcgttaaccggccaaagcgtcaacgccgtgtttggctggacgcattcctgggatatgggatccgaaccggacagtgacgaggcctgggccaaggtccgccacgatattgccaacgagctgcgtgtgtgggtcgacaaggccgctgcaggcatcgacttcgatccggcgaatctgaagctcacctcggtgaaggcctccggcacttcggccctgctgcagatcggccatgattcgcagcagatcgtggtcggccgccgctcgctgagccgtatggcccgctggttcatggggtccctgtccgcttcgctggccgaggccgccgaagtgccggtgaccgtggtgcgcatcgccggcagcgaggatgagaccgtgaccgacgccattgccaacgccctgactccgggagacaagcccgttcactacacgcagcctcagccggtggtcgaggaggctcgccgcccggtggtggttggtgtggatggttccgagacttcccgccgcgcgttcgatttcgcactggaagaagcacgactgcacgacgcgccgctgcatgtgatgttctgctggcagctcaaggatttgggcgttattccgggctatgagaacgccgtggcaccggtgaaggtcggtcaacgccgcgccgaggagattctcgccgagctgatggccaaagccgagattcccgatggcgtcaaggtcagcacaaacgccttccatattcccgcatccaaaggtctgatcgcggcctcgcggtacgccagccatctggtggtcggctcgcgtggcctgtccgggctggacgcgcacttcctgggatcggtgtcccgccagatcgtgaacttcgccgagtgcacggtgaccgtggtgcactgattcaccgaaatcggcatggagtgctaacgcacgcctcggtgatgggtttgcagggaggaattccttattcctgcaaccccatcaccatctacttttcgcggaattcggagtttattcctcgtccgccctgttctggcgcagctgctcgatgagatcgatgacggtttcgagttcaggagccacatcgtctgaaggacgagcgttatcctcttcgtcgtccatctcatcatcctcatcatcatcggcaacggtgttgttgaggatatcctcttcggtggcctcgtcgtcagcatcagacttggactcgtcgctggaatcagctgcatcaacatccacaacggaatcggatgcgttctgtgcaacggactcatcaccggcagactgggattgcgaggtcccgtcacctgccgtcccctcagcgggctcagtatcgacggcgttcccgtcaacagtcttctgtgcttcgatatcatcgccggcaggctcgcctgtcttgtcggtttcgccttcggcctcgtcctgggcagccggctcctgcttgcgcggacggttggccaccacgtcgatatgcagatcgtcgaaagcaggcttggactgcacccacagctggcttggctcgggaggttcgatttcggaatgctcgccgcagccgtggtccaaggaaaccacgcggccgtcatccggactccacttgttggcgcacacgccgaacatacggtcgagttcgcccgcgagcggcacgaagaaaccacaggtggagcacaggttgccttcagcggttttggtgctcaatgctttggggcctcgcggaccttcataccagcgcttggcagcctgcgcacgacccaacgaggtcagcacgtgacggcgggtcagtcggaaggtctcgacggcgtcgttgacatcctgcagcgaggattcctcgacttcgccttcctcgatgcgctcgtcatccggatcggtaccgatcgaatcggtgggagccagatccgtgggctcgaggcgatccttccaaggaatccacttgggcggcatcaacgcgccctcagtggggatcaaggaggattcgttgacggtccaggagtcgatctcctcgtcgtgatacagcgtcaccgaccattgccatccttcgtagccacggatattcgcggcgaagcggaagtcagtgacgtgatcctcaagatcatatgaggtaacgaaatcccccacctgatcgctctcgtcggccacttcgagcagcacggcgcgcgcgatggcgtgagggtccggtgtcacgatggtttcggtggtatcagtcatagatcagatcagtcctgtacatcgaattgatccgccaccgcacgcagcaacgtggccagctttttgctgtcggcagcagatgggtaacggtgacggcgcaacgtattgccggccgcatcaagcatcttgatgaggtcctcgcagatggcggccatgtcatccgccttcgggcgggtggccttgaccaagctgggagcggaggcgatcaggcgaacatccatggcctgcggcccacgacggccgtccaccacggaatactccaccttggcccccttgcgcaacgtggtggcgccagtgggtagggcctgagccggcaggaacacgtccttgccttcctcactggtgatgaagccataacccttggctgcgtcaaaccaacgaactcgaccggtgggcattgcgaaccttccttaatcctcaatggaaatagtaaaccgaaggtacagtttacctcacagggcttgacctcacgctttgagctgagtcgcctgagtcttacgctcagagctgaaccaagaagtcttctgtttggcgtccttggttttgccggtggactgcttgggctcaggagcggcgatctgctcaatcggcagcaccacggtgaaggtcaggcctcccccatcggtgccggtggcgcagataaagccgtgatgtgctttgaccacggattgcgcgatggccatgcccaaaccagtaccgcccttttcgcgggcacgggacgggtccgcggtgtagaagcgttcgaaaatcttcgagcgcgattcaggcggcacgccggggccatggtccacgaaacgcaatacggcgtatcgatagccggtctgcatcgaggcacctacttcggcggcgtcgatgaaccgccgcattgacgcgtcgctggcgggcatgcgagcgagctgtcttggatcgatggcggccggcatcacaccgagcgcggcttcagcgggcgaatcggcaggcgtgtagcggtggatgttgcccacgatgttggtcaccacctggcgcagtcgagaggcatcaccgggcagtacgacctcaggccaatcgccttcggcaaggttgaattcggcgggatggttcaaatcgcgcgccggttcgagggaaatccgcatgcggcgaacggcacggtccgggtcgagcgcatgcaaatcgtcgacggcgtcggtgaccagcgacgagagtttcaccgtgccggtcatatcgatgccgcgcccctcatcgagacgggccaaagacagcagatcctcaacaagaacagtcatgcgctggctggaccgttcgatatgttcaatggactcgtccgcacgctccaaggcaccaggcatatcgcgctgcatcttatacagctccgcatagccatggatggcggccaacggggtgcgcagctcatggctggcgtcggagacgaaacgtttcatcttgtcggtggtctcctcctgctcatggaaactggattctattcgggtgagcatggagttcagcgaggcggccagggagccgacctcggtgttttccggcgcggaaggaatacgttggctcaggtcaccggctgcaattttcgcggcggtcttctcgatgcgcttcagcggcgtcatcgtgtgctggatgatcagcgtggacagggagccgccgagcagcaccacggcgatgccgaccacaatgcagtatcgggtgagtgttttgacggtgtcgatctggtcggccagcgacaagccgatgtacaccacggcccggtccttgccgttttgttggaaggtcaccggcagaatacgccatggtgccctcgccgtgacgatggcggcatggttggcattgacagtggggttggccagtaccttggtgatggtgtcagaggaattggagtttccgttggccgaatcgttctggttgtccgcactgtcggactgcaccgtaatgatctgcttggccaccgcctgcgtagtgaatgcttgaccgagcgtgatgccattggtatcgccataggtaggcagaatcggcaccgatacgataccgtcctgcatctgcggcatcagcggagtcacgaccagaggattgccttctttgtctttggttccgtcggtgtattgaatctgcagaaagtacgagttcggccccgatgagtcattttttgacagcagatcgatattgttgaccaccagttggctttgcgagcttaactgggtgtcggttttctgcagcatgtagttgttcaccaacgcgcggatggagaaggaaatcaccgacacgccgatgagcagcacggcgatggtgcaggccaccagcttgctgctcaacgagatacggtcgatatgccgcatcagcatgtttttcttacgctcgcgctgctcttggaaatgggcggcgaacggcgacattgcaggcatgggattcgtgttcggggcggcgttcggcgtgctgctcggcggtacgccgcctgactgcttatcggggatactcatgagattgcgatacgttatggatggaggcgattagttcttcggttcgcgaatcatgtatccgatgccgcgcttggtttcgatcagcggagtcaccttgcgcttgccgccttcgccgtcgtcgacctcgatgccgtcgactttcttgcgcaggtaggagatgtacgattcgacgatggctgcgtcgccgccccagtcgtattgccagacatggtcgagaatctgtgccttggacagtactcggccctcgttgtccatcaggtagcgcagcagcttgtattcggtagggctcaggtcaaccggctgccctgcacgggtcacgtcgtgggagtcctcgttgatttccaagtcggcgacgcgaataatcgggtcgtcttccacctgttcgcgggtacggcgcagaatggcgcggatgcgagccacgacttcctcgaggctgaacggcttggtgacgtaatcgtcaccgccgacggtcaggcccatgatcttgtcttgggtgtcgtcacgagcggtgagaaacagcacaggggcgttaatgccttcctggcggatgcgacgggtgacggtgaatccatcgatgtcaggcagcatgacgtccaacacgatgagatcaggctgcactttttcgataacctcaatggcttcggaaccggaagcggcggtgtttacctcgaatccggcgaagtgcagggaagcgaccagcagttctcggatggacggctcgtcgtcgacaacaacaatcgatgcttcaataggcttactcatgtttcctagagtgtcgcgctcttctgggcgtttcctgaatgtcatcttggagttcggccttggaatccttcttgatctcctcgcgccgacgaatcaccaccatgaccacgatgatgatgaccagcgccaccaacaccacacccatgatgattatgcctacggtcaccgtggacgatgaggtggaggcttttttggatttcacgatttgatccatcattgccgttgccgcgccagaccagctcggcgggttttccagtaacggctgctgtgcggcttcggatagcttatcgacggttttgttatcgagaagccacttatcggagttcttggacacgacgaccaccaggttgccgtcattcgaggccacggcaagcatcactgtgttcggcttgggattcatggactccatcacggttgccgcccagtctcccggtttctgttgactattgaaactggaaagatacagcagatgcacgtgtacaccggtttccttctcggttttggcgatggcatccgtgacttcggccgcatgggagcccaggagattttccgtatccgtgatgttctcggtgatggtcacgccgctgtcggtgctgctgctggagctgtcagagctgtcgcctgagttatccccataggcatttgcggttatccacattgcgttcatcgctactgcagcaagggcgcaaatggcgcaaacaagccattttcggaccatattcccgaaggccgaataggacggctccgaagctaggaccacaatagttgtttttccgtcttcccgattcgttgttgacatatcctccaccttaacggccggtattggcaagcggccgccatacataccattaactctctagaaaaggagcaacgatgccccaatatcaggtagattccgagcgaatccaatcatcctcggccgcagtggccacttcgatctcgcaaatcaggcaggccgtgggcggcatgtacaccaatctcaatgccttgcaggacgcatggcgaggttcggcggccacccagttcaccgcggtagccgaacagtggcgttcggcccaacagcagatggaggcctcactcgagtccatccaacgctcgctgacgcaagcctccaccgtgtacgctgacgccgaaatccaagcttcgcgcctgtttgccagctagtttcttggctctcctccctgaggggagctggaatacaaaaaaggggactcccgaaggagtcccctttcagctcaatcagctagcgatcgtttgcggatcagtagcccatgtcggcaccggcggccggggcagcaggcttcggctccggcttgttggcaacgacggcctcggtggtcaggaacagaccagcgatggaggcggcgttctgcagagcggagcgggtcaccttgaccgggtcggtcacaccggcggccagcaggtcttcgtaggtgtcggtggctgcgttgaagccttcgccatcaggcagggagcggacggtgttgatgaccacgtcaccggacacgccggcgttctcggcgatctgcttgatcggggcctcgatggcgcggaacacgatggcggcaccggtagcctcttcgccggtcagggaggtgacggcctcggtcttctcggccttggcagcagcctgaacgagggccacgccaccgccaggcagcaggccttcctcgatggcggccttggcgttacgcacggcatcttcgatgcggtgcttgcgctccttggcctcgacctcggtggcagcgccgaccttgatgacagccacgccgccagccagcttggccagacgctcctgcagcttctcacggtcgtaatcagagtcggtgttctcgatctcagcgcggatctgggccacgcgagcgtcgatgtcttccttggagccagcgccctgaacgatggtggtctcgtccttggagacgatgaccttcttggcgtggccgagcacggaggtgtcgacggactcgagcttcaggcccagttcgtcggagacaacctgagcaccggtcaggatggccatatcctgcagcatggccttgcgacggtcgccaaagcccggggccttgacggcgcaggacttgaaggtgccacggatgttgttcaggatcaaggtcggcagtgcttcgccgtcgacgtcctcagcgatgatcagcagcggcttgccggtcttcatgaccagctcggccacgtgcacgatgtcctgctgggaggagaccttgccggaggtcagcaaaatgtacgggtcttcgagcactgcggtctggtcgtcagcgttggtgacgaagtacggggcgatgtagcccttgtcgaaacgcatgccctcggtgaagtcgaggtccaggccgaagcggttgttgtcttcaacggtcacaacgccgtcctggccgaccttgtccagagcctcagcgatcttctcgccgacctcagggtcagcggcggagatggtggcggtagcagcgatctggtccttggtctcgacgtccttggcggcagcgacgagttccttgacgatgacctcggtggccttctcgatgccgcgacgcagggcgatcgggttggagccggcgaccacgttcttcagaccctcgtgaaccagggactgagcgagcacggttgcagtggtggtgccgtcaccggcgacgtcgtcggtcttcttggcgacttccttgaccagctcggcgccgatgcgctcgtacgggtcttcaaggtcgatttccttggcgatggacacgccatcgttggtgatggtcggagcgccgtaggtcttgtcgagcacgacgttgcggcccttcgggcccagagtgaccttgacggtgttggcgagcttgtcaaggccctccagcatgccctgacgggcttcctcatcataagagatgatctttgccatggttgcgtattcctccaaatggctaggtataccggttatcactcgcaagcgtcgagtcgtgacgaccagccgtcagctgccgattatcactctcgacctccgagtgctaacccagacattagcactcgcgcccgccgagtgccaacaccatcggcggcgattgcgctttgggcatgaaaaagccccaaccgtcgaaacggtcagggccttcaaagcacatccttgcgtgcgtgttgctcactcggagcgggcttcacccgaagacagcttgacaacatcctttgcctgcgtgcctttgccggacgaagcgggcgtatactccacgcgatcgccttcgtacagcatcttgaacttattggtgctgccgtcgtccttgatttccgcgtagtgcacgaaaacgtcctcgccgccatcgtccggctggataaccccgaaccccttcttggcaaggaagaacttcacggtaccttgtgccatatctggtctttcctttgttcccttgggcgtcgcgacacaaaacctatagggaacgtagaaagaaccgcatcgcgctccccctacctcgcgactagatgacgattgtacagtgacgagggaacaatctcaaccgcagtggcacattttcggtacgaattattccatagacgtgagaacgctcacagttttcgatgtatttctcaccgatatcaggggcgcatcaacaacgctagttgagcaacaccaccgtaacgggaacggcgagcccttgcacctgctccacagccgaaatgccaagcgtggtcgccacatcctcggcggtggccttatcggtctcattctgataccacaccacggaagaagccggcaatgtgccgctcggattggtcgcctcgacactggtgtaaccggcggtctgcagcacatcggcctgctgacctgcatatccttggattcctgtggcgttgaccacacgcacctgcgtggccttattcacagtcgcggtggcttcggactgctgagactgctgatcggagttttgattctcattcgaggatgtcgtgtcactgtcggtatcggactttgccgaatccgaggtcgagtccttggacgaatcggtcgaagtggacgaggaatcatccttggtgctgttcttggtctcagccttgctggacgaatcggacttggacgtggtcgccgtctgggacgatcctcctattacattcttgtattctccggaaatccatgcccaggccccgacaccgcacagtgcggccaccagaataacgacgatgaacgggcagaggcgggccattaccgaacgagcgccacggtgaactcccaccggtcccttcggaggattgtcgaaggaatccggttcataggattcgtaggtcatcgtgtcgcgtgccataatcgccctttcttcctatcaaaactacccatgagtgtaatcggcaaacaactcatcagtccaccacaccacgccccatgcaccggatatgcacgtttgactacagtggtgagtcatgatcaaaccattgagcgaactggtagagccagggtgggcccatgccttggccgacgtggagcccaccatccaccatatgggcgattttcttcgtgcggaaaacgccgccgggcgcccgtggctgccggcaagccacaatattctgcgcgcgttcaccatcccgttcgattccatcaaggtgctgattgtcggccaggacccctacccgaccccgggtcacccggtgggtttgagcttctgcgtggcgccaaatgttcacccgctgccgaaaagcctggtcaatatttataaggaattggttgacgaccttggggtgcccatgcccaccaacggcgatctgacaccgtggacggaacgtggggtgatgttgctcaacagatgtctgactgtcggcgtcgggcggccaaattcgcatcagggcaaaggctgggaggaagtcaccgaggccgcgattcgtgcgttgaacgcgcgcacggacgccgacggcaagccccagccgctggtggcgattctctgggggcgtaatgcgcaaagcctcgagccattgctgaccaatgccttcattatcaaatcgcctcatccgagtccgctgtccgcttcccgcggattcttcggctccaaaccattctccagagccaatcaagccctagtcaccatgggtgccgacccggtggattggactctttaggcaggccaacagtcattgtgagtagttacagtggggggcatgactttgttccccacgcaaccgaacataccttcgccgaccaccgccgcacgaccggtcgccgttcccgcgcccggcgtgtcggctccgctgggtgccgatgacgccaaacgcgcacgtatcctggccgacgccattcgggcgaggttcgcccagacactggtgggtcaggataatctacgcgaatcgcttatcgtgaccttggtggccggcgggcatattcttatcgaatccgtgccgggcttggccaagaccacggccgcccagacgctcgccacctgcgtatccggctcgttcaagcgcgtgcagtgcactcctgatctcatgccatctgatctggtgggcacgcaggtcttcgattttgcgtcgcagaagttcaccacgcagatcggtccgattcacgccaatttcgtactgctggacgagatcaaccgttcgaatgccaaaacccagtccgccatgcttgaggccatggccgagggtgccacgaccatcggcgggcagcgtatcgccttgcccaagccgttcatggtgatcgccaccgagaatccgatcgaggaggagggcacgttcaacctgcccgaagcccagatggatcgtttcatgatgaaggccgtcatgacctatccttcgcccgacgaagaggctcggatgctggccatgctcacccgccgcggctccgatatgatcggtcccgacaccatcaccggcggacgcatttccgtgtccgacgttgattttttgcgcaaggcggcacgccgcgtgcatgtttccgacgcgatcatgcgttatgcggtcgatatcaccgccacgtcacgaggtgccggctcccgccccatcaagggactgtcgtccttggtgcgtttgggcgcctcgccgcgcgccaccatcgccttgacccgtatcggccaggcgaaggcgttgctgtccgggcgcgactatgtggtacccgaggacctcaaggcgttcgctcatgaggtgctgcgccaccgtattatgctgacgttcgaggcactggccgatggcgtggtcagcgatcagatcgtcgacaagatcgtcgaaacggttcctgttccgtgagttccgattccgttcgcaagaagatcgaggcccttggcactcagctgagcctgcctaccgtaaggaaggctttgggcgcgctggagggcgaacacgcatccgggcgtcgcggcggcagcggcgatgcgatggatgtgcatgcctatgagccaggcgacgaatcccgtcttatcgattggaagaccagcgcccgccaaggccgccccatggtggtcgagcgcgagcgcctgtcgacgtcacgggtctggttgctgatggacgtgggcctggagatgactggcgtatgcccttccggagaacgcgcatggcaggttgccgccaatgcgctgcgtatgttcgccgcactgtcgttgcgccggtcggacgatatttcgctggtgttcggcgatgagtccagtatcacccgcgtgccgttcaacggtgggttcgcgcagttcgaacgcacgctggacaaggcgcttgaccgtgattggaatcatcaccgtaatatcgacgcgctgctggaatatgcgcgccgtatcaaggatcgcgaggcattgatcgtattggccaccgatgagcatgcgatggaggagcggcatatcaccacgatccgtcgtattacccgcacccatccgatggtgctgatcgatgtggcgacgatgaatccgttcaaggccgtctcatcccgccacgctcccaccgacggcttgagtgcacggcgtgtgccggcattcctgcgcaacgccaaggcagcggccgagatcgatactcatcgcgcgtatatggccgcggctttggaacaggagctcacccgtgccggttcccatatcattcgatccgcatccagcgaatccatgttcgatcgtttcgtcgccctggtgtcccgggcattggcccgcaccacacgcaatagactgggtactgcacccgaactggtcggactgactttggctggtgatctatgatgcacagcatgttccccatcatcccgctcgccactgatcccggcgatctcaggcccgtggagtcgttggccttgaccactcccctggtggtggccatcgtcgcatgcctgttgctggcggtaggtctgatcgcgttgatcatcatgctgtctcgccccgcacgcaaacctcggaacagcgaccgtgcgcgtggcgctcatagcaatgccagctccaaggccgagtggcgttcccgcatcgacgatgtggtggcccgtcatgaatccggagcactgccccggcatgaggctttcgtcgaattggccgtcatcgcccgtgatttcgccggtgccgcatcaggcaaggagcttagttccagtacgctgaccgatttggcgtacctgaatcgcacgcccgcgaatcgccaaggattggacgcattgaagcagaccattggcgcgttgtatccaccggaatttgccgatgatgcccgcaaccgaatcgcccagacgaccagcgtgcagcaggccgccgagtgggtggcgaatctggtggaaaggtggcgttcatgatgctggcatggcattggccttgggccgctctggccggcgtcttggcgacgctggcgattatcgtgctgattgtcgtgttcgcccgccgtaacgccgccgacgacacccctgtattctcgatggatgacgatctcaataccgagcacgcttcccgcctgttccgtcaatggcgcgctttgggccgtctcgccatcagcgtgctggtgcttgcgctggcgctggccattgtgctggtggctcgccccagccaagtggacgccggtgacgaacgcgcttccagccgagatatcgtcctgtgtctggatgtgtcggggtccacgctcccctatgatcgcgaggtcatcgatacctatttggaactggtcaagcatttcgagggggaacgtatcggtttgagtatcttcaactcgacctcacgcacggtgttcccgctgaccgacgactacgaactggtcaccaaacagttgacctccgccagcaaggcgctgaaaggcgtcgagtcgcaggatgacatcgataagatgtccgatgccgaatatcaggacatcgccaattggctcgaaggcacgcagaaccgcaaggacgccacctccttgattggcgacggcgtggtgtcttgcgcggcgatgctccccggtttcgcttatggcgaagccaatcatgcggatgccgaccgtcagcgtgcggcatccatcgtgctggccaccgacaacgtcgtgtcgggcaagcccacctattcgctgaccgaagcgttggacttgacccagcagaccaaaatcaccgtggacggcctgtattccgggccgaaagccagtgaatcggaccaaaccacaacggatatgaagtccgcgatcgagtcgcatggaggcatcttcctcacccaatcgaatggcacgtcgatagatgagctggtacgggatattcagtcacgtagagatacggatgtggagaacaaggcgaaatcctcaatggtggacgctcccggtctgtggacgcttgctctggccgtgatactcattatctggatcgtatgtgcatggaggttgaggcgatgaacggattcaccttctcccccgccttgggctgggtcgccggcggactgctggcggccgggctcgccgtactggccattctcgaaatcgtattgtttgttcgtcgccgtgcttccagtgacgagaccgcgtgggcttgcatacgacgtacgctaatgctgctcatcgtcgcggtgatggtactgactcccagcgtggtatcgtctaccacctcacaggccatcaatgccaccgacgtcatcgtggcggtggataccaccgggtcgatggcggtggccgatgccacatacgggtccgagaagaccattacccgcatcgatgccgcacgtcaggccgtgcatgatgtgaccgccgcttatccggacgccagtttcgcggcgttacggttcggtgcttcgggaacgcttgatgtgccgctgaccccggatgcgccggccatcgataattgggccaacacgttggcggtggaagccacatccgtgtcggcgggctccagtctggatgctccgatcgatcaattgctgctgaccgcgaagtcgattcgtgaagcgcacccggatgatgcgattgtgctgtacctcatcactgacggcgaacagacctcgaatgtgacgcgtcgtacgttctcgtcactgcgccagtatctcaatgatgggtttaccgtgggcgtcggctcgaccgagggcggcaagattcccgtcatcgccgatggcgtcagtgccggcgattccaacaccacggaccactgggtggtcgacccggataccggcgaacccggcatctccaagatggatgagaagaaccttaaagacattgccgacgagatcagtggcacgtatgtggccgtgaacgcttcacagactttggcggattcggtttcggccaagtcatcgaagcagtggcgcatgaccaccacggtcaaggagcgcacacgcaccacgccggtggtatggccgctggccattgcgttggcgatattgcttgccatggaagtcggtgcatggatcgcaacctcaaggagactgctgtgagaaacagtaacgaaatccacgagaacgatggctcggcgaatactcggatgcgggcgaagtgcccgctttgggcacgtatcgtcctggcttgtggcgccgtattgctgttgctggttgccggcgtggcggcagtaaacctgtccgcttcgattacgttcaatcaggccaccgcatcattgaacgccaatatcaaagcggctcaggacgagtccgcggatatcaccacgctcaaggcgcaacagcagcagaccgatgcgcaattcgccgagaccgggcgaatgcgcacgcttctgttgccgcaagtcaaggacgccatcgacaccaatgcttcgatttcttccgagctgacaaagatcaccttgaaacaggccgaggcgcagaacagaggttccgattccgggcaagcccagtcggcacagcaatccgagagtacctcatccaatgccaaaaagggcggcgcgttgaccgacgaacagaagaagcaggtcgaggagctgatgaaggccaatcagcaatccaccgatacccagtcgaacaccacccaatccgagcagaaagcgacgcagaacaagggtaccggggccaccaagccgtggtaagcagtcgttcacagttgttcttttttctcacaccctcacgggtcatggctttatcgcggctgtttcccggtttcggctgtcggctttggcatttatccaattttcgataggccatggctgatccaaggtatgtccaaacaggctatttgtggataatcgttacgactatgcacaacacttggggataacttcacccaaaatcggcaagctagaaccacattggtcgttccggctggacaagcatgagtcttgtccttttagctggatatatgaatacctacaccagcaacccagcacccatcgatcccaccggcggctttgccggcaatacggtgacgccgttcgattacggcacttgcccttgccatgcggcggtacagcgtagtcgcgacctcgtgtccgtccagcgtgcggccacactggcgcaatcggaccagacggcggtggccgtgaaccgctccagcaacatcgtgtggaccggtaaagccgccgatctattccgatcgcggctcagtcgcaccgcacagtattcggccagtctcgcgcaagacatggagaccacccaccgattggcttgggggtcgtcatgagcgagcacgattactggcaagtggaatcgtccgtttacggcggagtgggatatgcgccagccactcttgaagaatatgccgccatagccaaggctctcgatgacgaggcggcaggatttgcggccatagccacggcttgggaatcggccgcattacagttgcagtcacatcggcatagtgcgccgatgtgcgtcaccttgcagtcgggcgatccgagcgccgttgttcccggccatgtcactgcaccatatgccgcgctgggcaatcggtgttatgaccatgcaacggcatgtcagcggttgagcgatgatctgcgtggcgcggccgatctgctgattcgcgcacactctctgtattctcaggcggagatgacggctcggcgcatgtttaccgaattattgcaggccggcacacaggccaaaccgggatatgccgcggcgggtgttgccgctgtggcggcgggcggctttctggccggctggactattgacggcaaaccgaacccggcatggatgtccacgttcacctatccgttccaggaaggagtgcttagcggcgcgggcggaatcattggcggcgtacctatcggcaagagcattgcgcacaccgatgaggtcaacaaggctgcggggaaaatcgccaatttctccggcccggcgaaagacgtcgtccaaggcaatcatctggacgtgcgcgaggtgcaggcgaatgccgacgttgtccgcgcaagcggatcggtggccgagtcaatggagaatctgcgcaggctcgccgaagagcggctcggcaaaatcgagctgaacagcggactcgaatatgggaccatcgccattcaacgctatgaacgatctgatggaaccaactcctggctggtcaccatcccgggtaccgatggacagcctgactcaccatttggctgggcgcagaacgtggaactgatgagcgccgatcaggagcgccgcaggaaagcggacagcgctcgcatggttgccgaggcgatgcgtcaggcaggcatcggcaaggatgagcccgtggcgctgatcggccattcccagggtggtatcgttgccgccacgcttgcctcggattgggcggaggaatataccatcgagcatgtggtgacagccggatcgccggtggccaatcatccgattccgcaacgcacgtgggtcaccagcgtggaaatcgatgatgaactggtcgccgcactggatggtgccgccaacccggtcaccgataactggctcaccgtacaagggcatgtatcgcccgcgcccgcggcaacaccatccacagtgcattcggacggctcatgcactcccggcgcaacgcccatcaccggtctgaccccatatgacgccgcacccgtggctggttcgaccaacggcagggagttgtcacactggatcaaataccatcaggccgcctatcagaacgccaccgacctcggctcccccgccgtgcaacgccacgaagcccatttccaggaagttatcaacggagagctcaaggaaacccgctactaccaaggccgcatgacccagtccgcgaccattgcccctagcgagcgaaccaccgagttcagcacgttcggcggttaaaagtaaataccacacttgacagagttgtcaagaaaggagttaacaatataatgacgagtaggagatggctcatcaaactgatgaagcaagcggcagaacgcaagaatgtcacgtttgaaagtatcaggcaaggagggagtcatgagatattccaactcgatggacttatgattccccatcccacgtcataacgaaatcgacaacaacctcgcggacattatttgcaaagaagcagaagccaaactcgggaaaggctggtatcagcagtgaaaacatatcaggtcatcgttcgtcctggcgaaaaatactggattcttgagattcccggtatcggtttcacgcaggcaagaacaacagcagagattgaaagtatggcacgcgaccttatcaccgtcatgacacaagatgctgatttcgcactcaccgtagagacaaagctgccgcaatccgtgcaggagcatcttgatgaagctcggcgactgcgcaaggaagaagcggaatgcagatcgaacgcagcgcgggaaactcgcgccgcagcacaagaactacatggcatgggtctcgccctacagcaaataggcgatatactcggggtctcacggcaacgggcacatcaacttgtcaatgcttagcatcaatcggctaccccacaatgcaatcaccgcagagacgcggctagcgccactttcccgggattgttgcgctagcatgcccgaaaccccctctatcagcgcaacattcccgggaaagtggcgcgcaaagagtgtcaggcgcgtcgctcgatgagtgcgcggccggatgcgaggcggtcgagcacaccggttttggcgatggccagcatcagataccaggccatcacgccgctgataagcacgccgccggtgacctcggaaatcatgtgcacaatgccacgcgggctgacgaatgacacacccacgtagcgaaacagcatcagatatgtgccgtattccaaggcgaccaacgcaccggatgcaatggaaatcggcagattgaacatgcggtaacgggtcaaggcgaacggaatctcagcgaaaacaccttgcaacagcgccgagataatcacgaagcccaaatcgaactggctaccaatcaccgtttcgaccagcgtgccgataaggttcacgtacagcgccgctccgggtttgcgcagaatcagcaccgccagcgtaccggagaagtaccagacggcgtgcacgatgctggcgaaaccgggcagaatcgcgccgaataccgaagagatcggcatgtacgcgaagttgaatccccagaagatcacgccgcaggccgcacccagcgtggcaccgaccgcgatatccaacggctgccatttcagtgacgatacggcaatcggacgtttcggaagagtatgaatggtggttgcaggcatggtgatctcctagccttaaaggccgcacacagtaatcgaaccacgggcgttccttgacctgtgcggctcgggcgggaacgccgcaccacagtatagccgctcggttcacggctggaagtacccttggaggttatgaagcttaccgatatttcccccgcaatcgcattgaccccactcgacggccgttatcacaaggccaccgccccgctcgtcgaatacatgagcgaacctgccctgaaccgcgaacgcatgcgtgtcgaagtcgaatggatgattcttctggccaacggctttgagggcaacggcaaccagccgatcgttgacggcgtcaagccgttcactgccgaagagcaggccttcctgcgcgccattcccgaggacttcggcgccgaaggcatcaagcagcacgccgctcatgaggccatcacccaccacgatgtgaaggccgtggagtactacatcgatgatcagatcgacaaggctccggccgagctgaccaacatcaacgacgagctgaagaccctcgtgcacttcgcctgcacgtccgaagacatcaacaacctctccatcgcccgttgcgtcaagaacgcgatggaaaacgtgtggaccccggagttcaagcgcatcatcgaccacctcgccggcaaggccgaggaattcaaggatatgccgctgctctctctcacccacggccagccggccacgccgaccacgctcggcaaggagctcgccgtctacgtctaccgtctgaaccgtcagctcaagcacatcgaaaaccaggagtacctgggcaagatcaacggcgcgaccggcacgttcggtgcccacttggccgcatgcccggatgtcgactggatcgctgtctcccgcgagttcgtcacgaaccgcatgggcctgacctggaacccgctgaccacgcagatcgaaagccacgactggcaggccgagctgtactccaccgtctcccacgccaaccgcatcatgcacaacctgtgcgtggacgtgtggatgtacatctcccgcggcgtgttcgcccaggtgccggtcaagggtgccactggttcctccaccatgccgcacaaggtcaacccgattcgtttcgagaacgccgaagccaacttcgagatcagctgctcgctgctcgacaccctctccgccacgctggtggaatcccgttggcagcgcgatctgaccgattcgaccacccagcgcaacatcggttccgcgctcggctactccttgctcgccctgaccaacctcatgggtggccttgagtccatccacccgaacacccacgtcatcgagcgtgagctggatgagaactgggaggtgcttggcgagccgatccagaccgccatgcgcgcctgcgagctcaagggcctgccgggcatggataagccgtacgagaaggtcaaggagcttatgcgcggccgcaccatcaacaaggaacaggtcgagcagttcatcgaccagcagtccttcgacccggaaaccgccgctcgcttgaaggctctgacccccgccacctacaccggtgtggccagccagctcgtcgctttcggccgctgagataggcgcgatgcgagtctctcgagtccctcgagtccctcgaatccttcgcatccaccacactactgcgctgagtcacaaaccgaaccgcaaactgaaccgaacaaggacaggcgtcaggtgaccatttcatgactactgaacaggatcagtccactacggaagatcgcccgaacaaggcgacctcctccactaccgaccggccgatcgcctctggtgacggccggtcggccagttttgctgtcagcggaccggacagcccggcaaccgacgacagcaacgattccggaccatacatcgacgacatcgctccgcgccgcacgcgcgacttcggcgacctgacccgagccggtctgtcgctattgatggccgccgtggtcatggtgttcgccgtgtatctgggcggcatgacgcgcggcgtcgaatccgacgcgcataccgccgcccaagccatcaactggctggctgctttcccctccaccgtactgacgcagctggccaccacggtcatcgtagttatcgtgctcgctcagttgctcttggcccgcgaatggctgcaagctgcggtgtccgcgctggccatgtttgccggatacggcattgtgtgggtcatatcgacggcaatcagcagtctgaacgatttcaccctgccaatggcactggtctcagccgccacctcatacggctccgggctgttgcccgacatctacgccggcatggcgtccttcctgaccgccgccgggccacgccgtacccgctccacggtcaaatggagttggaatatcctgtatgccatcgccgcggtgatggtggtgctttcgtggcattcggttaccggcatgctggtttcgatggccgccggtcgcacggtgggcatgcttatccgattcgtggtcggcacgcagaataaaggcgtgtggggcaaagatctcgtcgcagtgctctcaagcatcggattggaaaccacctcactcatccggcatcaggagcccggaatcagccatggctcattgtctgccacgttggatgacgatttggcggaaggttcgcgcatctacgatgtgaagaccgcgaataaccgtcgttttatcgtttccgtcatcgacgcgcaaacccataccgtcggctatctgaagcaactctgggattgggtgcgttttaccagcgtgtccattcgacgcgatcgttccgtgcgcgacgccgttcagcatcactttgccatgctgctcggcctgcacaatatcaaactgcccgcggccgccccctacggcatcgccgatacggacgagtccgcgattctggtgctggatgcgcacaccatcgagttgcccgccaacctgaacacgcttacccaggcggacgccgtagcgtatatgcgatatctgtccgtggcgaatcgccgtggatatacgcaccgacgcatcacgcctgatacgctcgcccggctcgaagatggcactgcggttatcgccggctggctgaatggcgacagcgcttccggcccggccaataccgcacttgacaaggttcagctactcgcgttgttcgccgcactgatcggcgtgaaaccggcagtcgcggccgcccgcgaagcttggggagacacgacgttgaccacgttggccccgttcattcagaaagtcgcggtcccctcccccacacgcgcattgggcacgtgggacaagcagctgctcaaggaactgcgagaccacatcaacaccataatcgatgaggagaccgccgaatccgccgagccggtgacgctggcccgcttctcctggcgttcgatgatcaccatgctgctggtcatcgtggctgtggtcgtggtcttcacccagctgaagcccgaggaaatcatcaccgcgctgaccaacgccaacccgttgatggcggtggtgacgctcgcgttcggtgcctgcggctggatcggctcgtcgatttcgctcggcgctctcatggatcgcaacagacgagataacacgggcgtcttcatgagccaggtggcaggcggcttcgccaccgtatccatgccagccggcgtgggcccctcgttcgtcaacctgcagttcctgcgcaaatccggctatcgcaacacccaggcgaccgcaattatgagcgccgcgctcgtggtgtattacgccgtgtacttctccatgctggtcatcatcggcctgttcaccggccgcaacatgttctccggcgcaatcccgacaaacacgttggttatcgtgctgggcgttgtggtcgtggtgctgtccattgcgatgatgattccaccgttgcgccactgggtgacccgtcgtcttatgccgctggccaagacgtatatcaaccagctgctggacgtgctttcccagccccgacagctcacagtcagctgcctgggcgcgctgttccagaacgcgaccactgggctcgctttctgggcggccctgcaagcgttcggccattcatcgaatccgatcgaaacgacgttcgtcttcctgctggcctatgcattgggttccgcagtgcccactccaggcggtctgggcggtgtggaagcggcgctgacattcgcgttcgtggcggtcggagtgccgcagggcgtggcgctttccgccactttgctgcaccgcgtggtgttctactggctgcgcattccgctgggcgcggcggccatgaagtggcttgacaagcataatcttgtctgattcgtctattttcatacccccttcggggaaatagatgtgaaaacccttataaaacgcgggttttcgcagaaacatgcgctagtatcattgatgacaacatggactaagcaaaagtgcttgtcccctgacccaagaaggatgctttatggcatacaacaagtctgacctcgtttcgaagatcgcccagaagtccaacctgaccaaggctcaggccgaggctgctgttaacgccttccaggatgtgttcgtcgaggccatgaagtccggcgaaggcctgaagctcaccggcctgttctccgctgagcgcgtcaagcgcgccgctcgcaccggccgcaacccgcgcactggcgagcagattgacattccggcttcctacggcgttcgtatctccgctggctccctgctgaagaaggccgtcaccgagtgaccttctgctcgtagcgattacttcgagcattactgacgacaaagaccccgaccgagatggtcggggtctttttgttgtggtgctgtgacgtgttgtccaaccgtattattccggactagttcagcgcttccataagctgctcgaatcccagggtgggctcggcctcgaagggatcgaggagtatggcttcccggcgttcgggggcggtcagggtcaggtgggtccagtcggcggagaactgggctccgacgttcagggccgcgtccacgaaccggccacgcagggcggcacgggtgtcggtcggcggattgtgcacggcgtattccacgttgtctcctgtcagcagctcacgcatctggttgcgggctacgagcgaaccgtacaggcgaccgttggcgatgtcgtggtagtcgagctcaagctgttccatctgggcgaaggtgacgtccgggcgacggcgtttgagcgcgtcgaacagacgcttcttggcggcccagtccacgcggtcggcgagcgcatcgtatgcaccacgctccagcgcgtccagaacgcggctccactcccccataatcgtgtcgatcgtggtggccggcagcgaacttgccagcgcatcgccatgggtttcgatgaaggccttgaccgccgcataataccggcgctgcagacccagtgcggacacggattcgcctgattcgagcgtcagttcggcgcgcggattgtcaaggaatcgactgaccgtgcgattggcggcagccggatcagcaaaggcatactgctcgaatccggacggaacgccatggcggaaggcgtcttcgatcgcgcacagcacaaggtgcgtgacggcaagcttcatccatgtggaccattgcgaacggttcgaatcgccgatgatcacatgcagccggcggaaggagtcggggtcggcgtgcggttcgtcgcgcgtgttgaccatcgggcgggagcgggtggtggccgaggagacggcctcgtccaggaagtccgcgcgctgggtgatctggaagccgtccggggtcatgcggccggcaccggtgtacagctggcgggtgatgaggaacggcagcagctggtgttcgatggtctccaacggcacgaagcggcggaccaggtagttttcgtggcagccgaaggcgtggccggcggagtcgacgttgtttttgaacacatggatcgtggcgtgtgcgccgtaggattcgcgcagcttgcgctgggccttcagggctaggttgcgcatcacgtgttcgccggcgaggtcctgggccagggcctcgcgcgggtcgcgcgcttcggcggtggcgtattcggggtgggatccgacgtccagatacagacgtgagccattggccagatacgtgttggtggagcgggaacgggagacgatgggctggaacatggtcatcgccacctggccggcgtccacggggcgttcggcaccggtgaccgccacgccgtattcggtttcgacgccgaaaatacggcagaacccgtccatctcggcggatggtacgggttccgtggcgtgcagggagcgggtgccgctgtcacgcagttggggcatcactcgccgcctttttgcacgaagctgttgacgtattcctcggcgttggtttccaaggcggattcgatgtcgtcgaggatgtcgtccaacacgtcggcttggtcggtggactcggtttgggcggcggcctgcgtggtggcgagggcgtcgtcttcctgggtcgcggcctgctgtgcttgaggttgttcgaattgttgtggcatgttgtcttctttttgggctgtcaaactcccctcagtcagccttcggccgacggctcccctcacccgaggggagccggaggagtcaaaaaattatcgctggttgatggagtcgagccacggatactgctgcaggtaatgctgcagttcgcggatgatgagtccattggaggccactacatcgttatcgtgacgccagtggatgcgttcgccgtcccaacggctcagcgtgccctgtgcctcccagaccactacggtgccggcggcgatgcccgcgatatcccacacgtgcagcatcggctcgaagtaggcgtcataggtgccgtcggccactttgcacaggtcgagcgagacggggcccacgcgcttgatgtcggccgggcgtccggcgagcgaggaggccacgtcgagcgcacgctgcgattcgctggggatgaaggacatgccgtagctcagcacagaaccatccagcgaggaggtcatcgacggcacgaccttgtcgcgcttctcgccgaccgcggttttgtggatgcgcacggcacccgctcccctggcggccaggtaggtcaggccgagggccggggcgtgcacgatgccgatgatcggcttgggctcgttgtccgggccgaattcgaacagggcggcggtcaccgtccattcgctcatgcgacgtacgtagttgatcacaccgtcgatcttgccgatgtaccagtaacgctggccagggcggctttcggcggggcgggtggtccagaagccgtcgaagtgggcgatgtcggcgattctggcgctcatgaagcgcatgatcttgttgtccacttcaagcttgtagcgggggccacggtccgcgttctcggtgctcggctgggcgaggttacgcggattgagttggtcgtggagggcatgctggccggcttcttcgagcaggccggcgactttgagcgcaaggttgcgcaggtcctgtggggtctcttcgcgtgtttcttccatagctaccaagtctatcgttcggcgttgatggccagcgacttcagcagatcgatggcgtgttcggctgaattgagttcggtttcgcagtgcgccttggtgaaggcgagcggatcggagatgtcgagggagaacaggtgatggtcggtagcggccatatggccggcattgccgtagaattcgaccgcctcgccctcgtctgcggcgcgcgggtcgcgaacagtgagtcgggaccagctggcggcggccacctcatcgccgaattgcgccacgagttttgccctgagccaggcgcgggtgtcttccggcggttcggtggtggcgcgtgcgatgtcggcggcgctcaccacccgttcggtgcggggttcgagtttggtgaagatgctgtccgcggggtcgagcgccgcccatttcaggtcgatgaccttcagtcgcggatcattccatccgttggccacgccgggtgcggacgttgtggtgattttgcggcgcagtttttcgagcagctgccatttgagcagccattcgatgcggctggcctcgccggtcatggccagacgttcgtcatcgtcggcggcatggcggatggaggcgcagtcgatgagcgcctgctgccacatcgccataatggatgtggtggatttgtccggccaggcgggttcgccggcggtgtcggtaccttcgaccagtgcggcaacctggtagacggcttggcgcagtttgagctggataagccatgcgttggtttcgccgccgttggccagcggcaagattgcccccagcgtcaggtcgcgggaaacggtgtgtatggcctcgactgggtcagacagttcgagttcgtcgaggaaggcgttcaggtcgaatccggcctcgtccgcatgttcgagcagccacagcagcatgctcgtggtgccgagtttcagtgcctgcggcacctccatgcgattggcgtcgccgacgatgacgtgcagacggcggtatgcatcggtggagtgggattcgtcgcgcgtattgatgatcgggcgttcgaaggtggtttgcaggccgactttggcgtggatgtagtcggcgcgctggctgagctggtagcccgggatctcgctgttctcgccaatccctacgcggccggagccggcgtagatctggcgggtgacgaagtggagggtcatcaggcgtgtgaccaagtcgaatggcaccgcgcgggccatcatatagttctcgtgcgtgccccagcaggagcccttgccatccacattgttgcgatgcagggcaatgggagtgccagtctgtttgcgggcgcgttcggtggcggcctgcatgatgaggtctccggcgtggtcgtatcggaccgcttcgaacgggtcggtggtttccggcgccgagtattcggggtgggcgtggtccacatagacgcggccgccgttgggggcgatcacgttggtgatgttgagctgcggggcgtcggtgagcatgtccgggcgggcggcggcgcgttcgagacgggtgccgcgcgcgtcgttgaccgggtcctcctgccggtagtcccagcggatggatttgctgtggctgtccgcggcgccgttcaccacgtcgaaggacagttgcaccgggttgtagcggtccggggtgttcagggataccgcgtattcggtttcggtgcccatcactcgtttgacggtcatgtagtgctccttgagcttgagctattcggcggtgcggatgcggcggatcgggtccatgccgttgatgcgcgaccattgttcggggtccacgtcagccatggaatcgcgggtctcgcggtattcgtcttccacggcggcggcgagcaacggcacggtgagtgccacgtccgagccggtttcgatggattccttgaccgctcgggtcttggcccggtccacgatgttcttgagcatcgcgccggagaccacatcggccaggaacaacgcatgccactggccgttctcctcctgcacgtcgcatagatggcggcgttcggaggctccgtagatgtcatgcaccagcacggcggacaaggcgtgcgcgtcgacgccatcttccagaggcaggtcgtcggtgaggtaatggtccacgatggcgatggcctgattggctttgggccgaccgacgcgaatcttgacgtcgagacgccccggtcgcaacacagccggatcgatcatgtccacgcggttggaagcaccgattaccatcacattgtcgagtgattccacgccgtcgagttcggagaggaactggggcacaatcgtggtctccacatcggaggagacgccggagccgcgggtgcgtagcagcgaatccatctcatcgatgaacacgaccaccggattgccgtccgcggcgcgttcacgggcgcgctggaaaatcaggcgaatcagtcgttcggattcaccgacgtatttgttgagcagttccgggcccttgacggacaggaacacgcccttgacatgggtttcggccggactgattgcgccgtcgccattcgaatcgtaaccaccctcgcatagggcgttcgccacggccttggcaatcatcgtcttgccgttgccgggcggaccgtacagcagcacgccctttggcggcttcaaatcgtagcgctcaaacagcgcacgatgctggaacggcagttggacggcgtccctgatacgaccgatctcactatccaggccgccgatgtcggcgaacgtgacatccggggtctcctccagcaccagatccttgtcgccctcggcgggcagcacttcgatggcgaggcggacggacggatcgacgataatacggtcgccctgattgatgcccgcatacgcgagcgcgccggaacggcggatgagcacgggattgccggaggcgtcggtaacgatcagtcgaccgtcgtcaagtacctgcttgacactgcgaatctggcccacggtgtcagcatcgcgctgctcgaccagcacgagcttctcgttgagcatcacggtggccccggcggtcaggcgggcggcgttgacgttggaggccacaggcaccaccatgcggcgggtgccggaaatgacttcggccgacgcgtgctggatgccgtcttcatcggtgcgggtggaatcgaccttgaccatggtggcgaaggtgagcggcggctgagcgagctgggcgagctgtgacttcgccttggtcagttccttgccggcgcggctcagcgcttcggcgagcgcatggttcttggccatcaggcgatcgttcagcgcggcgagatcttcggtgtcgctcatgcgggttcttcgcttcccttctatccgggattttcggcaacttatggcagtcggcagaccctattcgttgccgtcggcggatttcctgttacgtataacagtacgcacttttcgcaccacgaaccatacgatgaccacaatcacggccgcgatgaccacgtcctcgaacacgccgagcgcgccttgaatcgagcaccactggtcgccgagcaggtaaccggcggaaacgaggatggtgttccacacggccgagccgagcagggtccagccggtgaagtgcaggaagttcatgcggttgaatccggcgggaatcgaaatcagcgagcgtaccacgggaatcacgcggccgatgagcaccgaccatgtgccgtatttggtgaaccagtcgttggctttgctcacgtctttgcggctgacgccggggattttgtctgccgcgagattgatgcgatgcaggcccacccagcgggagatgccgtacaaggtccaggcacccagtacggagccgatggtggcccagatgattgcgcccggcagactcagggtgccgcgtgcggcggtgaagccggagagcggaaggatgacttcggacgggatgggcgggaagatggattcgagggcgatggccaaggccacgccgataccgccgatggtttccatcagcatgatcagccagtcggtgatggtgccgatcaggccgggttcggtggtggtgcagatgggtgtggggtcggttgcaagaatagtggcggctgccatggaaaaactcatagagggcattgtcccaaggttttcccagaatcagaagcatgacgcaagaagatgtgcattttgttgacaagtccgccgagagcgaagttgggagcccggctgattctgcggtttctgtgccgacgctgagcaagcccggcctgctggttatggatgtggactccacgctcattgacgaagaggttatcgacgagttgggcgtggtggctggctgcggtgaggagattgccggagtgaccgcacgcgccatgcgcggcgaactggagttctgcgacgccttgcgcgctcgtgtggcgctgctgaaggggctgccggtttccgcgttcgatacggtgcatgacaagctgcatttcaccaagggtgcgctggagcttatcgacacgctgcatgaacacggttggaaggtcggcgtggtgtccggcggcttccatgaagtggtcgatatgctggcggccgagggccatatcgactattggattgccaaccggcttgaggttgccgatgggtgcttgaccggcaaggtgctcggcgaaatcgtgagcaagaccgtgaagttacacgccttgcagacatgggcggaccgtttgggtattccgatgagccagaccgtggctgtgggcgatggcgccaacgatattccgatgattcaggccgccggcctgggtctcgcgttctgtgccaagccaaagacccagctcgccgccgacaaagccatcaacgaccgcgacctaacccacgtactcgattacctgcgccggtaaaattttaccgacctcggctccggcacttatagttgagccatgactacttcaggcgcagaacagttgacgcttgcggggctggctccccgcaagcggcgtaaacgtgcgcctgcggagcatacgccggccgagcagcatcccatagcgcaagtcgtgttggatgtgcaggcgctccacctcggccagacattcgattacttcattgatgaaaaagacagcgaggccgcacagccgggtgtgctggtgcgcgtgcggtttggcggtcaaagggtcagcggcgtgatctgggcacgcaccgataccagcgataccccgcgctcttcgattcgctatatcgaacgggtgttgagccccgatgtgctggttcccgcatcgatgcgtgaggatatcggtctgattgccaaagcctatggcggcacacgggccaatattctgcgtttcgctgtgccaccgcgcgtggccaaggtggaggccgaacagcggttggccgcgtcgttccgtcggccggtcggcggctcattgccagataatacgcaaggcggttttgccgggcgtggcaccaatcccgatgggactatgcctgctggctctacctttgccgttgccagtaccgtttcggagggggctgcgcaggggtatcgtcgtctgaccgccaattacgccgacgtcaatgtgcttcatgatgcgcttaccggtcagcgtttccaatcttttgtgtttgattcgctgcccggtgcacaggagtggcaacggaacatggcatggatggtggccactgcgctgagtgccggtaaagctgccgtggttgaattgcccaccatgcgcgaggtcgaagacctgatgcctatgctgcgcaattatggactcaaaccgttcgccccggcacccgccggcggctgggtgggcgacgtcgccgtgctcaatgcggagaccatgcctgcggccgaccggtatcgcacgtatctggccgtggcgttgggccaggtgaaggtggtgatcggcacccgcgcggtgatgtatgcgccggttgcaggcccggcactgttcgccattctggaggatgccgcctatcagaacatggacggtatgatgccatatccacaggcccgtggcgtgatgcggctgcgctccaagtcccatggcggcgtgttcgtggccatggccaatgcgcgcaccccgcaaagccagtgggaaaacaccggcccggatacggtggagaccccggtgagcggctattccaccgcgattcacccgctcgcctcgccgctgaaggatgcgacgccttgggtacgttggctcaatcgcgatgagcttgcgcgtcttgccgacccgtccatcggcgcacgtgtgccgcatacggctgtccgcgtgctatctaaggctttggagagcggccccgtgctgctgtccattccgcaagacagcgtcagtgagactctgagttgtgcgaaatgccatcgtcaggtgcgctgcgccaagtgttccggaccattgcaactaccggccgaccgccgggactccacaccgcgatgccgctggtgcggggctgccgccatcaactggaagtgtccgggctgtgggcatgaacgtatgcgcgtggtgcgcgtgggtgctgcaggcactgcggcggagctggccggattgttccgtggcgtgccagtagttttgtccagcaagacgcagggtctggtgcgcgatgtggcttgccagccgatgattgtcatcgccactcccggtttcgaaccgcgcgtgcgtccgatcagtgccgagcagggaacatccggtcatgagtatcgcgcagtggccgtgctcgacgcttggaccagcctgtatgcgttgggcgtggatgctcggttggatacgttgaccgcgtggatgcgtgcggtgtcgttgtgcgcgccgcgttcccgtggcggccaggcgttgattctcggcgaaaccgacccggccatcgcccaatcgctgatgctctgggattcgaggattcttgcagccaaggatcttgaggagcgtgtggagaccggtatgccgccggccgtggccgccgcctgcgtgtggggccgccgtgatgcggtgatgatgctgatgcagcgtatcggcgccctgggcggcgattggacggcctgcggcgagctgcccggcatgttgggcccggtgccgatcgcgcaaccggacacggtcgacgcccgggagctcgaagccacggccgaccgggtgaaggcagtaatccgtgtgccgcagagtcggcgagccgagctggcggcccgactgcaccgggaaaccgctcgtcatgtggcgtcccgcgaacccggcgagcttcgcttccgagtagatcccaaggacctgatctaatcgtcttcaacacgtgaaacgataattacagaatgaacatcgctagaaggaggacactatgaagggttggcctggagagccggatatggattacgacgtgctggtcgcggatggcgaggccgctgcgaacgccggcaagccgatcaccgacgtgatcttcgatttcggcaacgtgctgatttactgggatccggtcgccgtactcatcccccgctacagccagaagaccatcgacgaattcctcgacaacgacatctccggcttctacgatgtcaacgacctgatggacggcggcaccagcaccgacgaggccatcgccatcatgcgccgtgacaagggcgataagtgggcggacatcctcgactactacatcaagaacttccgcgactccctgaccggcatcgtgccgggcgcgcgcgtgctggtcaatgacctgaaggctgccggcatcggcgtgtggggcctgagcaactgggaatccagtctgttccacgtggccgaggaacagtgcgatattttgcagcagcttgatggcaagctcgtctccggttttgtcaagctgcgcaagccacacaaggaaatctacgaggccgcgttgaaccagttcggcatcaaggccgatggcgcgttgttcatcgacgacaaggccatgaacatcgtcggctcgaatgcggccggcatccgtggcgtacgtttccaggatccggtcaagctgcgtgaactgctcatcgccaatggcgtgaacattccggccgtgcagtgagcatcgacatttcaaggaggaccatgctcaaactcgtgttcgccggcacccccgacgtggcggtgccctcgctcaaggcctttgccaccgatccacgttttgatgtggtcggcgtcattacccgccccgatgcgcctaccggtcgcggccgcaagctcacgcccagcccggtcaaggcgacggctctggagctcgggttgcccgtcatcgatctcaaaccccgctcccccgaattcatggaggcgttgaacgacctgcatgcggatatcgccgctgtcatcgcctatggcaatatcctgcccaagaacgtgcttgatgcggtgcccatgggctggtacaacctgcatttctccaacctgccgaagtggcgtggcgccgctcccgcccagcgtgcgatttgggcgggcgacccgaccaccggcgccgacgtgttcaaggtgggcgagggtttggatgatggcccgatcgtcgcttccctgaccatcgaactgaccggccgtgagacttccggcgaactgcttgaccgtctggccgaggaaggcgcgcccatgtatgtggatgcgctggccgccgtaggtgaaggcaccgccacattcaccgcgcagccggccgagagcctggaatacgcgcacaagatcacggtgaaggacgcccgcatcagttggacggacgaggccgaggccatcgaccgtcagattcgcgcctgcacgccacatcccggggcatggaccgaactgtttgcggaagggccaatcgccgataatgacgagtcaaccgctaaatccctcgccctgcatattctcgccgcacaaccggccgaccagtccaatcccaacactccggccgagcttcagcccggcgagctgaaggtgggcaagaagaacgtgtgggttggtaccggcagtacgccgctggaactcacccaagtcaaggcgcaaggcaagaaggccatgcgcgccgccgactgggcccgaggcgcacgcctctcccccgccgcctgcgtgcgataacaagcaatatcgctcccgccttcggaagcacagtaaaggcccggcatcttcataaagaagatgccgggcctttcagctatgcaatcggcgatcagttgagaccggagagcttgttgatcagctccgggtcacgcgtcgcacccttgtcggccgagcgggcgaaggcggcgtacgccttcagcgcctgggagacgtggcggttgcggtgagccacgtagccgtcgccagcctcaagctcgcgacgacgctcgtccagctgctcgtcagtcagttcgacgttcacggaacgggcttcgatatcgatatcgatgatgtcgccgttcttgatgagcgccaccgggcccttgttggcagcctcaggcgccatgtggccgatggccagaccggaggaaccgccggagtagcgaccgtcggtgagcatggcgacctgcttgccgatgcccttgcccttgacgaaggaggtcgggtacagcatttcctgcatgcccgggccacccttcgggccttcgtaacgaatcacaagcgccatgccgggcttcagggtgtcgttcagaatgacctcgatggcctgctcctgggagtcgaccaccagagccggtccacggaacttccagatctccggcggaacaccggcggtcttgaccacgcagccgtcgggggccaggttgccgcgcagcacggcgaggccgccttcgtgaatctccgggtggttgatgtcgtggatggcgccgttggcgcggtcacggtcgagcgaatcgaacagggtggtgtgggtccacggctccggggagatgatgtggccaggagcggccttgtacatctgctgggcttcctcggtgcaggtcgggcgcatgatgtcccaatcggccagcttggcttccagcgtcggatagtcgatggagtgcacgttggtgtgcagcttgccggcgcggtcgagctcgccgaggatgccggtgatgccgccggcgcggtgcacgtcggaaatctcccacttgccggacggcgaggccttgcagatgcacggcacggtgtgggaaatacgctcgatgtcgtccagggtgaagtccacgtcggcggactgggccatggcgaggatgtgcagcacggtgttggtggaaccgcccatggccacatccatggtcatggcgttctcgaaggcttccttggtggcaatggagcgcggcagcacggaatcgtcggaatcgtcgtagtactggtgggcgatcttgacgacctgcttggcggcacgctcgaacaggtccttgcggtaggagtgggaggcgaggatggtgccgttgccgggcagggccaggccgatggcctcggtcaggcagttcatcgagttggcggtgaacatgccggcgcaggagccgcaggtcgggcagacggtcttctcatagttgagcagttcctcatcggagacgctgtcgtcggcggtggcgtacatcacgtcgataaggtcggtgctcttgacggtgccgtcggcgagcaccgtggtgccggcctccatcgggccaccggagacgaacacggtcgggatgttgaggcgcagggcggccatcagcatgcccggcacgaccttgtcgcagttcgggatgcagatgagtgcgtcggcacagtgcgcgttgcactggtattcgacggtgtcggcgatgatgtcgcgggagggcagggagtagagcatgccggtgtgacccatggcgatgccgtcgtccacggccatcgtgttgaactcgcgcgggatgccgccagcttccttgatagcctcggaaacgatgcggccgaccttgttgaggtggacgtggccgggcaggaactcatcgaacgagttggcgatggcgatgatgggcttcttgcccatgtcgtctccgctgacgcccgcagcacggtagagggctcgggcgcctgcaaagacgcgccctgacataatttttgcagatcgcatttcagtcatggttctattcaagcccttgtgagggacacgccacttgtcaagagtcgaataatggaatttgcaaaaacgtaacgtttctcacacatatttttggaatacattcctccactggaagtctggcggaggtccggcagaagtccccccaaacggctacacttgcttcggttgagatagattttccaatgtctggagataagaacaatggcttttggtactgacccgacacccgacggtcttgcgaacccgccgatcgacgacctgatgaagcacgccgattccaagtacgcgctggccattttcgccgccaagcgcgcacgccagatcaactcctacttcacgcagctcaacgagggcctgctgcagaacatcggcccgctggtcgaataccagaacaatgagaagcccctgtccatcgccttccgcgaaatcgacgagggcctgcttgaggagaccttgggcgaggacgacgccaacgagggcaactgatcgattccgacaattcgtttggattgtttggacagttcgtcgccgaatgatggtgtgagagttctctcacaactgattttgagcgacacgcttgcctgagttatcgcaatcggctataactcaacatcagaagcgaataagacgtaaggctcgcgccaccgcgctggttggcacgagcctttatttatgcccgcttccacagtgacaagtaaaaattgacaccgtatcattgtgcctcgcatcccgcggggcgataagtcctgaagaaagggatgatatgacaaaagaacatcggcttatttccgccgaatccgtgaccgaaggccaccctgacaaggtctgcgatcaaatctccgatgccattcttgatgatttgctggcccaggatccgtccagccatgtggccgtggagacctccgccgccaccggcgtgttcctggtcttcggcgaagtcacatccaaggggtattgcgacgtgcagtccatggtccgcgaaaccctgcgcaacatcggctacacctcctccgaggtcggccttgacgccgattcctgcggtgtggtcgtggccatcaccgagcagagcgccgaaatcaatcagggcgttgcccgtctgaccggcgatcaggagaccgccgccagccgcgaagagcgttacgaagcacagggtgccggcgatcagggcgtgatgtttggctacgccaccgacgagaccccgacgctgatgccgcttccgatctacttggcacatcgcctcgccttccgtctgaccgaggttcgtaagtccggcgaagtgccgcacctgcgcccggacggcaagacccaggtgaccattgagtatgacgatgacgataagcccgttcgtctggacaccgtgctgatctccactcagcacgatcctgaggttacgcaggattggcttgctgttgagctgaagaagcacgtgattgacccggtgcttgatgaggtgctgggttccagggtgccgcatgacaactaccgtcagctggtcaacccgactggttcgttcatcctgggcggcccggcggccgacgccggtctgaccggccgcaagatcatcgtcgacacctacggtggcgccgcccaccacggcggtggcgcgttctccggcaaggacccgtccaaggtcgatcgttccgccgcgtacgccacccgttgggttgcgaagaacatcgtggctgccggcctggcccacaaggtcgagatccaaatcgcctacgctattggcgttgccgacccggtatccgtcaacgtggagaccttcggcaccgagcaaggcgtgacgcgcggccagatcgccgccgccgtacgcaaggtcttcgacctgcgccccgccgccatcatcgacgagctcgacctgaagcgcccgatctacttgaagaccgccgcttacggccacttcggccgcacagacgttgagttcccgtgggaaaagaccgacaaggtcgaggagctcaaggccgcgattgctgcggagtgatatcgactagtccaagaaggggtgtttccgctgatgccagcggaaacaccccttcttgtatatgagtctagtgctcgttcttcgtctcgctttgtccatccgtattgtcggtatcatcgatgtcgaatccgcccatgagtacgaaacgcttcaacatattggtggcgcgcatacgcaccttgaacaccggcaatgccttgtgatcatgctgctcaaagaaggcttttgcccgttgcacgtcaagcgaggaacgcagtgcatcgaaacgtccgaactcgttgatgttcgcctcgtctatacgtttggcaaggaattcctcgaccaccgatctgttgacacccaatcgatcgaccagtttgtcgacttgctcattcttctcgcgtgcagcatagcgcgtgatgtaatcacgtagcgtcataccggcttcgacctccacgtcgccacgctccacgtcatgcaggaacagttcagcgagtcgttgttcatcccgcgagagcgcggcaaaggaccggtgcagctgcgcagacatctctgccaactccgggctattctccttgagcgccttcagccatttatcgaagttggcattcatgtaatcggtatcgatgagtccggtatcaatttcggtgaggtaaccatccagttcatatggcgcttcaggattatcgttcacatcatcatctgggtcactaccgcgatcgctattgccatcgaacagttctttatagcgttgcgcaagaatgaggtacgtacgttcgtcaatttgaggacgcaccacttcagactcgccatgctcatcattgtcctcattcgtatcgtcagtatccgtgctatcgaccttgtattccgtggtgctccagtcaaagccctgcactttcgccgcttcaaggtaccgattcagttccacgaactccttggcaaacttacgtctagcctctaccgactccggcagctgcataaggtccgattctccgctgtctgagaatacgtcgagaatctcacggtaccgagtatccatggatttcacattcgctggcaatttctgtacgaacaggtcgagcggtcgatcacccgaatacagtttcacagctgcctcgatgaaaccatgcatggtgtacggcttacggtaatagcggatgacgccaaacggcttatctgggccaaacagacgattcgtacgactgaacgcctgaatgatgctttcgtagtcgataatcttatcgagatacagcgtattcacccatttcgagtcgaacccagtgagcatctggtctacgacaatgagcaaatcaagctgctggctgcggttcgttgctataccaccatacggactcttgtgcgacagtcgcgaagaaatatccttcttcatcgccggccatgtaggaatgacgaattctttgccgaacgcctcgttgtaatcggtgatgatttcggtcagcgcatcctctttgtctgtcgctccttcgttgttgtcgatattgggatcgaacaacgccgtcacatgcaacttgggtgcctgctgcttgaacaagtgataatagttgacagcttcaggaatggaactggcagcgagcatcgcatggaatttgcccgcatggctgagcaccgggaactgttcaagaatgtccgagaccaccatactcgggtgcggagagtcgataccatattggtctcgtcccaggaaatcctcgatgccactgatgcggttcccggcaccatcaaccatcggacccatggggacctcagacttatccatgtaatgctggaatactttggccttgaccgagtcggcgagcgcatcttccgcactctccgccttcgccttgtcgagagccacggcacgtctgacttcagaatccttgtacgtggtcaccatgtacgggtcgaacccgagcacattatggtcgcgaatgccgtcggcaatgctgtatcggtgcaaacagcggccgaataccatggcagtggtggaattcttcttttggttctcatccagaatgggtgtgccggtgaagccgaagaacagcgcattcgggaaggaacgacggatgtcctgcaacatgtcgccgaatgtggaacgatggcattcgtccacaataaaaacgatacgtcgtgcagccagctgatccagccacgcctgggtgacgccccgctcccctgctttcacgttgctcatcttctggattgaggtgacgatcagggtgtcgttgacattggtgctgttgagtttgtcccgcaaaacgccggtgttctcagtaccttgtacttccgtctcactgtcagcaaaactgcggtattccttcagtgattgggtgcctagctcgatgcggtccataaggaacacgactttatcggcgtcatgcgaatcagctatgagttgtgccgatttgaagctggtcatggtttttccggaaccggtagtgtgccatacatagccgcctggtcgtcccggagtagttggccgctgttcccaatcgcatttgcgcaccacgtcagagatggcgttcgcagcgatgtactggtagctgcgcagcaccttgaggcatccgtctgccgagtcggcgatggtgtagaagccgatgagctgatgcgccatgggaatggacaacagccccgcagtgccggaagtaccgccgatgaacagcttccattcgtctttgccggggttttgcccgccgcagataggctcgttgttgtagtcagcccaatggaagtaatagcttggattgaatttgtctacgcccggattggcgaagtagacggcgtcatcggggttcatggctacaaaaatctgtacgagtcggaacaggccggtgaatacgccttcgtgtgtgtacttttcaatctgattggttgcttggctgaccggtatgccacttttcttaagctcgatatgaatcaatggcatgccattgatgagaagcacgaggtcgccgcgccgcgagttcaacatcttgttcttggcgggatagaccggttgctgagcaatctgataggtgcttttgccgcctgcgatttccttgcggtcatagatgtagaggctgatttccttgccgaaatgcgccacatcttctttgttgtcacgcgtgatggacacggtacgcccattgacgaacgaattgagcgcaagcggggttcgtagggtctcaatctgctcgattatctgtgccatttccccgtctgtcagcgggtatttgccaagcctgtctatgtcgttgttgttgcggtacaggatgcctttccaattgtcgagcagatcctgttcggttggatagcgcaagacgccatccttccatccatgctgcttaagcacggtaatgacgttgtcctcgaacaccgattcgctatcgaatatcacgattcttctctccctcggacttcccagtgtcctgcttttcgcgagccgacgcgcttgagtaatccacgcccaatgagtatttcagcatctcttcgcacagtcgctgatgaaactcccgcagcacgagccatatcctcgtatgttgtactgggattcctttccacgaaacgaagaacagttcgctgtctctcggttatctgctcacttggaccgtttaactgctcattattgtcagttatctgctcacttggaccgtttaactgctcattattgtcaattatctgctcattgtgagcggacttggcatccgattccagcataagcgtgagtatcgtacgatcagcctcgccgaatttttcctcaatccgtggttcgggaagtcctgcattcgcccatgtggcaaacacatcaggaacaccagtaccggctcgctcccccacatcgatgaggctgaacatcttcataatcagtccgttgcgcggatcagatactccgccaaggcgcatttgctcaacgcccgttcggatatcaccaggattctcgaaaaccaatttatcgggtgtgcgtctgaccaccactccacgcacgccataataatcggcgttgaacaagcagttggccagcgcctcgcgaaccgccttatgcatgggagtgtcgtcaacacgaaagataccgttaagtttgaagggggtcttcagagactcggcaagcttacgattcacacggaaaaagaaatcaaagaggttgcccgaccacatgccatcgccggaatgaacacgatcggtccaacgaatcgccgggtctagggtctcctgatagtcaagaaagtaatggggacattcgcgcacgatgtcatagtcgttgccgaacatgagcaaaccgccgaatgtgggatggagcttaccatcttcacggctcaccattgccgcaccaaccgcacgcaggaaacgctcgtcatcaagatcagtccaggaactgccctgacgtgccgcacggaaacgggtgcgatacgcccgcaccgtatccgcattgaaatcggcaacagtgagatcgtccagcaccttggaatccatcgtctcggttccctgatctcggagcattgccgaaatctcctgccgcgtgcaacgatagtcaccttcaccgcgccggcggtaggttccctcaaagagattgtcgttgatatgcacgggacgttcgtcgcgtggagcacgtggaacatgaatagccaccaccatgccatcatccgcttcaagcacttcgacttccgattcgatgggcagcacggcgcttaccttggatcgattgctgaccgtattccaaaaatcctgacgaaggtgctccacctcggctggcgtaagcccgactgtttcgaaggtaccgtcttcacgttccttgacgccgagcagaatgacgccgccataggtgttggcgaaggcggaataggtctcccacatactgcgcgggagaccacctttcgcggctttcgcctcaatccgattattctcgcgatatgaggcgagctttacgatatcgaacgtttccattgcggctcctcccctcacacaaacatcttgtcaagcaaagatttcttgatatcctgcagcaattccaacttacgctgatgaagggtgatgaggtcgtcgagagatcgcaatgtcatcccgatttgctgctgttccgtttttgaaggaagcatcaattgataatctgcgtattcctgcgcattgacaccaggctgcccggaccgctgcgaggttatggcaacatacttcttgtatgcatcggtcaaggttgcctgataggcgaattcggggtcagcgccttcgccgattcgggcacggataaggaatccagcaaagtagaccattccatcgaattgcctgtacagatatgtttttcctacactcgcgcctgtgcgagcaaagagcagatcgccctctttcagtaaataatctgcactcattgcaaggtcagctaacggcgtcgtaagatcgcttttcgagaactcatgggtttcgtcatcaatgtcggtgatacgcagatatttattttggccatcgtattctgttgcagcagcgttcaagccgtaatcaaatgaagacgcaacgtctcccaacttacgctgttcccaaggggcagtaaaaccagcaaagcgaatttcgggtacagattcgccatccttcgggaacattttttcaagcatcgattttttgaagatgacgagcttgtcatacttacgctgatgaagggtgatgaggtcatcaagacgggagaagaaagttccgattgcctgctgttcagccatatttggtatgtcaacaggatatggctcaatgtgcttgttattgatctgcggaatggtcgaagtatctgcgatccgataaaggccggtctgattgatgaacagccataggaaatcagcatctacgcccctgggctccagagccatcatgttcgtgtcaatataggcagttttccccagaactctaaccttattgccaagtattgctgctcctcttttcgcaaaaatgatactgcctttgcggataggtttaactgctgtgttggcgtctaccctctgcgcagaatcaaattgaaaatgagaagattcattcagatcatcaactttgacataaagaaaatttcccgcagaaaatgcgctgggtggagctccagcaccaattgacacaatctctcccaacttacgctgttcccaagggtcagtaaaaccagcaaaacgaatcgcaggaactttcgcctgttcagtcatcatttgcctcccaacagggtcttcagctccgcaataccagccatgtcgaactcattgccagttagctgatcaagcatattgccaagttctgcctcagcttgctcgatttgctcgcatacatcggagtaggtagtcgaatatttgtcgttcagcgcattcaccgatgcaatcaactcatcaacagccgtctgaggaagctcctcaagcttgcgctgcaatggttccacccacttggcagcaagcaagtcagcagcttgttcaccgctcagtccttcaataacggtccgagtcttctcatcaagcgctgagcggagattcttaacgttctttttgacttcacgctcctcatcaaacaaccgttgcgcattcacaagggcacggtcaaaatcagtctcaggatccttcccaatcgatttcaccgctttcttcaactcagtggcaacgaaagaatctccatcctcactgacagcatcggtcgaattcttgtcgtcttcatccagattttcaagaatgtcagcgatctcgctgctaatctcagtcaatcgggattcatatgtgccgatttctgcaaggtcagcactcagcagtttttcttgtacaaggtcgaacggcagaatatgtccggcccagccgtccggcacttcgacatccttgccgcctttcttcttgacgaccatgttggcatcaactttgcgaacggcgtcatgtccctcgctctgtatggtctcaaggtcgttggcgatggtcttctgccagctgtcatcaagcacctgatatgccgtataggcatctacgagtggtacgtcggccaaacgatgcagcaggtcatttgccagaacttcctcctcggcggcaatgctcacgttgacggcattaccgaccagttcgccacgtagatatgagggataatcggtgaaaacctcacgataacgctggatataggcactcacaccagaatcagcattcaccgcctcacgaacatcttgcacagcgagcttagccgaatgaccattctcctccgcgaagagacgttggcgcaatcccggaaacacattccaatacttgttgagcgcatcgatgtcctgcttggggataccgccaaacatagtggaatacacgtcccaactttcggcggtttcggaggaatccacatatcgaggaatgttgaggttgtaatcgttctgccgaatctcgtcaatgctgaccaaacgactgaacttatcgacatcacgattctccgacaccgcatccacgatgcgtttgatatcgctcgcacgcagcttgttgttcttaccgtccttagcgaaatacttggaggcatccacaacaagcacatggtcatcgttgcggtgcttgcgcagcaccatcacgatagtgggaatgcccgtgccaaagaagatgttcgctggcagtccgatgatggcctgaatatggtggttctccactagattccggcgaatagtgccctcttcaccaccacggaacagcacgccgtgcggcaacacgatggtcataatgccgtcgtcgcgcagatggtagagatcgtgcagcaagaaggcataatcagccttggacttgggagcgatgccatattcgaagcggatatcttcacccggttccggcggctcccagttctgggagtaaggaggattcgaaaccacggcatctacaaacagcggctcataggtctcgtccttggtctcgtcggtatcgaaccacggccagtcgctctttaatgtgtcaccgttgcgggtcacgatattgtccggcagtataccgcgcatgacgaggttcatgcgtgtgaggttgtaggtattctccttgagttcctgcgcataatatttgatgtcattcggattgccattgcggcgggccacagcttgaccaatatgaatcaacaacgagcccgagccacttgtggggtcataaatgttgatttcttcacgaccagcaagatgccaggccactatttcgctcatgagctgagaaacttcgctcggcgtgtagaactcaccggccttcttacccgcattggaagcgaagttgctaatcagatattcgtaaatgaagccgagggtatcgtaatcctgccggctgtccatcggaatgtccttgatgaggtagatgaggtcgcgagcggccttgctacggcttttctcatcggtaccgagtttggatagaccagtctgcaacgtgtcgaagatgccggcgaacacacgcttgcgggctggatcgatgttgcgttcaaaagcggaaagcgcatcacgtacgtcggcgatggtgaaatcgctttggctggcaatccatgtggagaacaggttgtcgtaggagataaagtagccgcacagatcacgtacatactgtacagtttcggcatcattctcatccaagcccttgaggtcttcggctccccagtcttcagcacgcagacgagcaatctccgtctccgagaggaacttatagaagataaagccgaggatatagtccttgtattcattcgcctcaatcttggaacgcattttattggcggattcccagattttggcggcaagctgctgcttattcattcatatgctccttgtgccctaagctctttcattactcttcatcaacgtattcattgaaaacgtcactgtccacggctttgatttcgtaaatcttccgcgtgctgacaccgaatccatgttcaatcatcagttgcgcaagcttatgcccatcaataagaatgatgtgctgcctcttcgcataggtaatcgccttttccgtgaatcttgcagtggtgacaaacagccctttgcctccgcgcccagtaatagcacctacgaatgcttgaatatctggtctgccaacggttttatcttcggcataacgtttggcctgaacataaatcagatcaaaaccaagcttgtcttccatgatgattccatctatgccttcgtcccccgagattggcgtcatctggcttgcggagtcgaaagctccataccccattttcgccatcagatcaagaacaaaccgttcaaacgcaatcggagagagcttgagcacctctgagagcaagtcatcggcaagccgcatgttgattgatgagaatgcacggtcaagtgcctcatctggagtttcctcggacgaataagcttcgcttttcttctccaggccgccatcgaccgtcgtatgtgtcgaagaatcaccattcagattcttgaaagaccggaatgactcataacgttccagataatcattatctatctgcgcacccgaagcaagggcctctttgccgggtctcgttatgcgatatgtaccacgtttgggactttctatgagtccggctttcttaaggtacgttctagcccaactaatgcggccattgaggacacgcgaacggccgctaggtagcagacggctgcgttcttcttctgtcactgcaaactcatcagcaagtaacgttagcatctcaccagatgcatgaatcttgccatcagcgaggatgcgaagcaccggaacgaaaaactcgtcatatctgggaattgtcattgtccgccttcgttccgttacagtcgtttatcaatgatacggcaaacatcacggaaatacgcctccgcttgggaacagcgtaagttgggagagattgtgtcaattggtgctggagctccacccagcgcattttctgcgggaaattttctttatgtcaaagttgatgatctgaatgaatcttctcattttcaatttgattctgcgcagagggtagacgccaacacagcagttaaacctatccgcaaaggcagtatcatttttgcgaaaagaggagcagcaatacttggcaataaggttagagttctggggaaaactgcctatattgacacgaacatgatggctctggagcccaggggcgtagatgctgatttcctatggctgttcatcaatcagaccggcctttatcggatcgcagatacttcgaccattccgcagatcaataacaagcacattgagccatatcctgttgacataccaaatatggctgaacagcaggcaatcggaactttcttctcccgtcttgatgacctcatcacccttcatcagcgtaagcgtctgtggtttgctaaataagggtggatagggctctcatcacgatgtcaacgtctttgttctccaattcacggatgacatgcagatatgtttcctgcgttgtgttcatgcttgcatgccccagtctcttggacacgctcgcaattgaaacgccagcaaacagcagcaatgaggcatgggtatgtctcaagccgtgaatcgagatcacgggtactccggcttgtttgcaatgccgggccagaatatcgtttgcggtcgagttgtacaccttaccgttcacgaagataggcttgtcgtcaggcaagttcttcagcaggacggacaattgcatgatgagttgccaatcaagttgtactttacgcaccgaagaagcattttttgttggaacaaagccacctccgttcttgtaattccaagtcttattgacagacaaagtctggtggacgaaatcaaagtcatcaggagtaagacccaatgcttcggagaaacgtaaaccggtttttgccaccagcaatatcagccagtcccagttaggtatcgggccaagcttcaagtcagcaaggacagcatgaagttcgaattggttaagatatttcgtcttcttttgtctcggctgcttccctttgatgattgcttttcgagtgggatctctttgaattaggccctcatcaacagcatcaagaatggcccctttcagttggtgatgaaaatccatcgttgtttgatgttcatgatgttcggcgtatccattgatgagtttctgataactcacacgatcgaactcagaaagcttaagatcagggataagctttctcagccacgcctgtgtgagtttgtatttcttcatcgtcacctcccgaatcgcgccttccttgtagacgtcgacccattgcgagtagtaatcgcagaatgacatttcttcgtttattgtgtttatgaccacacggggctcctttgccgaatagatagacgcttacgctgatgaagggtgatgaggttgtcaagacgagagaagaatgagccgataacctgctgctctttctgctgaggcaatgcaaaagacaattcttttacgatagaccccgacagattaccttgacctccttgaagatatgtatcaacaattcgggctttttcgcgacgcagccagcttgcaaggaaaagaggatcattccccgtatgaggggagagagcgagaatcgcctgattgatcgcgccttttattgcagcgattcctacttccccactggttgctccatatagtgcatacagcacggtgccacgttcaacaatctttgctgaagaattatctaggcctttctcggtcaagaacaattctgtcttgtctgagttaatttcagcggaccggataaacggaatcgaacctccataataagaggtatgactcacgtcaggggtccctccggaaaaggaatccgtcacatcgcccaacttacgctgttcccaagcgggcatcggcactagatgaagcagggtagacgggatacgagtggctggccgaacatacgcaatacatctaccgacgacttggacactaccatttccgctgttagctacacttatcgcgataagtgtagctaacgacgattggagcgacaccttacaagccatgagaggtataaccgttccccttctattttgaaaaacttgaataagttagattttttcaaaatagggatgcgtcgaaaagacgcataaacgcacgaaaaatgcgggcatccgacatgcagtgttcattgaatcactgtatatcggatgcccgcaatcgtttcaagccgattgaagagcctcagctcagcatcagcatcacgccttaacaacctctacggccagctcggcaccttctttcacctcgaaggaggtagccagcgtctcgtgggcgatcagatccttgaactgctcgaccttggccacgtcgtcagcaggcacggtcagcaccagcgagatgcggtccgcgatgtccagatcggcagccttacgtgcgtcctgcacagaacgaatcacgtcgcgggcgtagccctcggccagcagatcggcatccagcgcggtgtcgaggatcacgaaaccaccggtcggcagcgaggcggagaccgaagcggcggcctcggtggcgttctcctcctccacacggttgatcagctcgtactcgccttcgaccagcgcaaggtcgccggacggcgtggagaccaccggcgcaccggacgcagcatcgacatgccagtcgccggacttggacgccttgatggcgaactgcacctgcttgccgaggcgcggacccgccgcacgggcattcacacgcagctcgtgcacgatcttcagaccgtgggcggcggcatcctgcagcgtcgagaactcgatgttcttgatgttgagctcggccttcagcagatcgtcgtacgccttgacggcctccacgttcccggccaccacggtgagcttggaaagcggctggcgcacgcggatcttggcggccttgcgcagggacagggtgccggaaacaacctcacgcaccttctccatcgcatccaccagagccgggtcgtcgaccagcacgcggccgagttcggtgtcttcaccggtcttctcgtccaccacgaacggccaatcggccaggtgcacggactcgccgccggtcaggccgcgccacacggactcggcttccatcggggccagcggcgcaagcacgcgcatgaacgcttcaagcacggtgtacagcgtgttgaacgcggacgcatcctcgttccagaagcggtcacgggtgttgcggatgtaccagttggtgagcacgtcgatgaagtcggagaccgcatcgcaggcgtcggaaatcgcgaactcgttcagcgacttctcggcggccagcaccaggcggcgggtacgagccagcaggtagcggtccatctccggcagaccggcgacctcgtccgcgcgcagctggcgggcgtcgaatccggccccgccattggccgcgttggcgtacaaggtgaagaagtagtaggagctccacaccggcaacatgacctggcgcacggtgtcgcggatgccatcggcggtgacgattaggttgccgccgcgcagaatcggcgaagacataaggaaccagcgcatggcgtcggaaccgtacttgtcaaacacgccgttcacgtccgggtagttgcgcaagtgcttagacatcttctggccgtcggagccgagcacgatgccgtggcagatcacgttcttgaacgccgggcggtcgaacagggcggtcgccatgacgtgcagcaggtagaaccagccgcgggtctggccgatgtattccacgatgtagtcggccgggaagtgctgctcgaacttctccttgttctcgaacgggtagtggaactgcgcgaacgacatggaaccggactcgaaccagcagtcgagtacatcggaaatacggtgcatgtgcgacttgccggtcgggtcgtccgggttgacgcggaccaggtcgtcgatccacggacggtgcatgttgatgttgccgtccttgtcgcgcgggtagtcaccgaagtcggccttgagctcttcgagagaaccgtaaacgtccacacgcgggtacttcggatcgtcactcacccacaccggaatcggggaaccccagaagcggttgcgggagatggaccagtcgcgcgcgttggcgagccacttgccgaactggccgtccttgacgttgcccgggatccagttgatttgctggttcaattccagtagacgcggcttgatcttggtcacggacacgaaccaggaggagaccggcttgtagatcagcggggtggcgcaacgccagcagtgcgggtaggagtgcacgtagctcttctcctggaagaggatcgcgcggcgctcttccggaatctcggcgagcgggccatcgccggcgcgcaggttgcgcaggatcggcaggttggcgtcgaacacgaaatcgccctcgtagtcggggcactgcgcggtgaagcggcagccatcgtcgagcacgtcggtgctcttgatgcccttagcgttcagcgtgttcatatcgtcttcaccatagggagcctggtgaaccagaccggtaccttcaacggtgtcgacgtagtcggcggtgaagatcgtgtagccgttcgggccaggcacgtggccttcggattcggcctcgtcacccgcgaagtacgggaagaccgggtagtagcggcggccttccagctcggagcccttgagctcgcgcacgacctcgtagttctcgccgagttccttctcatagtgcggcagcaaatccttgccgaggtagaacttcttgccagcgaacttgccttcggtcgggcggacctcgacgtagtcgatgtcgccgccgaccacgatggcgaagttggtgggcacggtccacggggtggtggtccagaagacggcgtaggcgtcgtcctcatcgcgcatcttcacggccacggacacggtggtgtcctggcggtcctggtacacgtcggcgtccatgcgcagctcgtgcgcactcaacggcgtgcggtccttcgggcagtacggcagcacgcggtagccctggtaggccaggcccttgtcgtagagctgcttgaaggcccacatcacggattccatgtacgggatgttcagggtcttgtagccgtgctcgaagtccacccaacgggcctgacgatgcacgtagttctgccattcgttggtgtacttcagcacggaagcgcggcaggcgtcgttgaacttgtcgatgcccatcttctcgatctggtcgaccgagtcgatgccgagttccttctgcgcctcaagctcggcgggcaggccgtgggtgtcccagccgaacacgcggttgaccttgcggcccttcatggtctggtagcgcgggatcacgtccttggcgtagccggtcagcaggtggccgtagtgcggaagaccgttcgcaaaaggcgggccatcgaagaacacgaattcattctggctgtggtcgccggaagggttgcgttcaacggacttctggaaggtgtcgtccttgtcccagtagtcgagaacggtctcctccatgttggggaagctggggttcggcgcgacgtgcgcggtctcgccgccctcgttcgccttgggatatacgttttcgctcaccgtaaatctcctagttgtactgtgcactggtcctacaggagcgtcattgatggcgattgccgggcgccgacgtgtgccggctgggttcacgaatgtcacgtaccgaaccgtggggccgattgcgtcaatcgcctcgcagccggaactgactgtgttccgcccggaacagccaggtttgccgttcctgcctacgaggacgatgacgggcgctggcatgcgctccgcaccgcggtaccacctcgcttatcgcaccggttgcgccgctccgaactgttgcactcggagccgcgagcctgcgcgaccgcttgtgttcggctgtctcgggccgatcccgtcggttctactgggcgattgccgccgttcttccgaagactccccgctgataacggatcactgcctcacaacggtgcatatcgtaacacgccacgcggtcaaatcgatgggaatgttcatcaggaatgttcattctttctcatttttgtattcatcgcgtgcaccattgtcagcaaacacgctaggctcctttaccggcgatattgcacatctggctcaggggcggctcccgtatgggccggagaaaggattattgaggaatgacgtacgatttcacgtcgattatggacaggcatggcaaggatgcgattgcggtcgatgggttgggaaccgacctaggtttcgctcccgacccaccgagggacggatttgacgtgattccgatgtgggtggcggacatgaatttcccgaccgtgcccacggttccgcaggccattatcgaacgcgcgcaacaccccgtctacgggtacttctcccccaccgacgactattacaactccattatcgactggcaatccacgcgcaatggggttaccggattgaccagcgaggcgatcggctatgagaacggggtcttgggcggcgtgatcagtacgctgaccgcgttcgccgctcctggcgacagcgtgctcctgcacagcccgacctacatcgggttcaccatgtgcatcgagaacaacggctatcgcatcgtccacagcccgctcaagttggacgagcacggcgtatggcgcatggattacgaggatatggataagaagctcaaggagcatcacatccatgtggccgtgttctgcagccctcacaatccttgcgggcgcgtgtgggagcgttgggaaatcgagaaggccatggaagtgtacaaggccaacgattgcgtggtcatttccgacgagatttggtccgatttgactctggggaatcaccagcacatccccacccagtcggtcagcgaggacgcacgcaatagaaccgcggcgttctacgcgcccagcaagaccttcaacctcgccgggctcgtgggcagctaccacattatctataaccccatgctgcgcgaccggatcgtggccaagggctcgaagtcccactataacgagatgaacgtgctttccatgcatgcgcttatcggtgcctacaagcctgaggggcatgagtggctcgacgaactcaaagaggtgctcaccggcaatgtcgactacgcctatgactacatcaccaagcatttccaaggggtgagtttggccaagccggagggcacctacatgctgctgctcgactgcgagcagtggtgtaaggctcatggtttgactttggcggaattggagaagcgcggctgggatgtgggcgtcgattggcaggacggcagcatgttccaggctccctacagcatccgtgtcaaccttgcgttgcccttaagccgcatcaaggaggccatgcgccgccttgaccaatacgtattcaacgcgtaaacggcatgcatccgcgattgcggtgtcctggaaagacgaatgccgccaacgaggtttgtgcccgttggcggcattcgtcatagagaagccgagccaatctaccttcacaactaatcgtcgaggctgtccacaccgagcttctcttccagctcgatgacaatgcgctcgtgcatcttttcgtcgatcttcaccgtgaacatgaagacgagaagactcagcacgatgaaggcaagcgggatgtagaacgcgaaggtctcgaaggtgcgcacgttggcggcggtcatgtcggcggcggtggcggagccaaccataccggcggccacggccacgaagccgacgatgccgttggacagcgcgcccgcgatcttgtcgagcatcggacgcacggagagggttacggcctcgttgcgcttgccggtcttgagctggccgtattcgatggaatcggtcagggagaggatcgcggtcatctggatgaacgtgccaggcaggtagaacagaatcaacgccacgatcaccacgggcaggctggccgaatcgagaatgaacagcacatagccgattgccataagtaccatgccgccgcagaacaggtatcggcgcggtatgcggcggttcagggccgggtagagcggcgccatgaccaagcccgcgatcacggggatcacgccggtgatggcgaaggcatccggcaggttaagcacgaacttgaacagatagaacatcacgccgttggtggccacattcgccactgcatacagcaggtagctcaacgccacccacagcagctggtcattttttacgatagcggcgaacgcctgcagcgggttgccgctctgatctgccctggaacgtaggacgctttcgttttccttggtgccgaacgccacggtccatgcggtcaggatgccgagcaatgcggtgatgatgccgaatgccgtccagcccgactgactttcggcgcgagaaccagtgaacatgaaactgaaagtggtcacgatcggcaccacgacgatggtgatgccgttatagccaatcgaaccggtgaacgtaccgagcgcagtatatacgctgcgttcgtgcgagtcggaggagatggcgggaatcatgccccagtaggagatgtcacgcatcgaatagaacacgtcgaggacgatgaacaccacgacgaacagcacgatgaaccaagtctggttcacgttgaccagcccgaacagaccggtgtagaccatgacgagcagcacggcggagaccaagccgccgatgaactgccacgggcggaaccggccgaagcgggtgttggtgttgtccaccaagttacccagtaacgggtcaaggaagatctctgcgatacggattatcacgataaggcttgtgatcagtgcgatgagtttggtggccaaggctttctcgacattgacgaacagcacgctggtcacgtaaacgacgaaataggtgctcagcgcgttatagaacgccgactggcctagattaccgaaagcataggcggcacggcgcctcagagtctctgctttggtaggacgatttatctggccggattcatctccggccggattcggtgattgggattcgctctccggtgactgtgaaacggacattgacattttctccttagagtcattctcggtgaggtcttctccgacctcgttggagagtgtacatcattaccaacccgatgtctatttagaagtgcaacacccttgttggtcctgtaattctaacagttcgtcggcgaacgcctcggcgggcgtgcggtagccgagcacgcgcatggggcggttgttgatctcgtcgacgatctccctgacctcctttgccatgtccatccggatctcgcagcgtttgggcagataccggcggatcatgccgttgcggttctcgttgcttccccgctgccagctggagtacgggtcggcgaagtacgtggccatgcccagcccgtcgcgcagcctttcgtggtgggcgaactcggtgccgttgtcgtgcgtgacgctgacgcgcgcgccggccggcagcggcgagaacatgtccagctgcgccccgacgctctcgccggcggtcttgtccggaacgatgcgggccatgaggaacctggtccttctctccacctcggtgtgcaggttgcatcccactccgatgacgctgtcggcctcccaatggccgaacgcgctcctgccgtcggcctccggcgggcgttcggagatgggcactcggccggggatcgggaagcgcgacgtcctcctgccgccgtgcctgcggcgccgcctgtgccctcgcggcaggcaccgcgcccagcgttcccgaagcggcctgctggagtagacccatcggtagatggtctccgggcacacgcgcatgagcgcatcgtccggccacaggacgcgcagcctgccgctgatgagcagcggcgaccagccgcggcccagccattcggccacctgcgcccacaggcggtcgtgcgacagccggtagggctttcgtggcttggatctcctgcggtcggccttgcgctgcgcgggcccggcgatgtagtagcggccggtccatggccccgccttcagtcttttcggccggtacgggcggtacgactcgttctcgttggacgggaaccatgtgttgcgcttgatctcccggctgatgctggacgggctgcggcccagcatcgcgccgatcccgcgtatgctggcgccgttgcctacctcgatctggatgacctggcgttcctcttccgacaggtgcgaatatacttctcccataggtgcgacatcccttcggactggttttctaggcaatttccaatctaacgggtgttgcactttcatttagacaacgggcaagatttaataaatcttttcactaattattgtcaatagaaccaatctcaaaaccaacgtcgcagcactcgcaaaaatcgcagaattccaacgaatacacacctctatcaccatatgaattatcgacagcgcgacacaccgccacagaaaatacctccagcaacttgcgatctgcaccatcaggctttaccataatcagtaaagagttttaccctctgaatcgacaacgtggttatcaactcaaggaaagcggttatgcagcatcccatccccaccaccatcgcatcatctgattggctcaccgatccgaccgtattcgccgtcaaccgcgaaccagcccattccgaccatcgcttctacgatcacgtaccgcagccgaacgaaacgatgagcctcaagcaaaaccttgacggcttgtggaatgtcgccgtgacgaccgccccggttttcggcttccccatgaacgattccggcaacgctgaatctccggatttcaccgcaaccgattatgacgacaccggtttcagccgcatcgccgttccctcaacactggaaaccaagggcttgctgaaccataagtacgtcaacgtgcagtacccctgggatggccacagcgaccccaaggctcccaacatccccactgatggtcacgtagccatttaccgccgcactttcgagacaagcacccccgtctccgccgccatcgaaaacaagcgccgcatcacgctgaccttccacggcgcctccaccgccatctacgtctggctcaacggttccttcgtcggctacgccgaggactcctacacacccagcgaattcgacgtcaccgaggcactgatttccggaaccaatacactggccgtggcctgctatgaatacgccaccgcaagttggctggaagatcaggacttttggcgcatgcacggtctgttccgctccgttgaactcaccgcgcaacccactgtgcacatcgaagacctgcacatcaccgccgatttcgaggcgaccacccatgccggcaccatcgacgcccatgccgtgatccgcaacatcgccgacgccaagcaactcagcgccgcactcatggatgccaacggcacgccggtctggcaggattcctatgccatgtccgacatcgtcgacacctccggcgtaccctgctgcggcaccgcagacgccgcgatcgacagcaccgccgtgcaattccgcgcgaatctggccaacattcgtccatggagcgccgaaaagccctacctgtacacgctggctctcaccgtgcgcgcagcagacaacagcatcatcgaagtggtgccgcaacgtctcggcttccgccatttcgaaatcgttgacggcattatgcgactcaacggcaagcgcatcatcttccgcggcgccaaccgccacgagttcgacgcgcgtttgggccgtgccatcaccgagcaggagatgctcaccgacatcatcacctgcaagcgcaacaatatcaacgctattcgcacctcccactacccgaatcagacgcgattctacgaactgtgcgatgaatacggcctgtacctgatcgacgagacgaaccttgagacccacggcagctggaccattcccggtgatgtggagacccctgaaaccgccattccgggcagcaatcccatctgggaaggcccttgcgtggaccgtatcgccagcatgatcgggcgcgaccgcaatcatccgagcgtactgatctggtctctgggtaacgaatcgtacgcaggcgaggtgttccgcgcgatgtaccgcttcgctcacgcggccgactccacgcgacccgtgcattacgaaggcgtggtgcatgaccgcccctttgacgacgtgaccgacatcgagacccgcatgtatgccaagcccgcggaaatcgaggaatatctgaccaatgatccgaagaagccctatatctcctgcgaatatatgcacgccatgggcaattcggtcggcggcatgcatctgtacaccgagctggagcgttacccgcattatcagggcggctttatctgggacttcatcgatcaggccctgtggcagcagctggacgacggcaccgaacgcctgacctacggtggcgactgggacgatcgtccctgcgactatgagttcgccggcgacggcctagtcttcgccgaccactctccctcaccgaagctgcaagaggtcaagcgtctgtacgctcccgtggtactgaccgtaagcgaccacgatgtgaccatcgaaaaccgcaatctgttcgtctccaccattgatttcgcgttcacggcgaaactgctggcggacggcaatgccatctggcaggccgactaccgctttgatgtgcccgccggcgagacccgcaccttcccgattgacttcccgtcggtggacgccgctggcgaaatcacctatgaggtcgatcagtcgctggcaacggcaacaccgtgggcaccagccgactatgaactggcgttcggccaacacaccgttcagtcagtcgtgccggcttccgccggaaccgattcgaccgcgtgcggcgcggttccctccacggctgattccgatacttccgataccggtacagtaacggttggccgctggaacatcggcgtggtcagcggtgacggacgtaccgaagcgttgctttcacgcacgcagggcggcatggtgtcattcaagcgtgacggtcgcgaaatggtgttgcgccgtccggcgatcacctgcttccgcccgctgaccgacaatgatcgcggcaatggcagcggcttcgaccgcgtgcgctggttcggtgccggccgttatgcacgtatagcgaatcagcagttctcgcaaaccgagactggtgtcatcgccgaatacacatatacgttggccgagccgggcgaaacccaagttgccgtgcgctatgaggtggatgccgccagcggacgtgtacatctggccgcccgatatgccggtgccaccgatgcgccgacgctgccggcattcggattggaatggacacttcccaagcagtacgagaacctgcgcttctacggccttggccccgaggagacctatcgcgaccgtctgcacggtggcaagctcggcattttcgagcgcaccgcggccgaagacaatgcaccgtatctggtgccgcaggagaccggcaaccatgaagacgtgcgttgggccgaagtgcttgacgcccaaggacacggcatgcgtatcagccaggccggcagcgaacatttcgcggcgagcctgttgccgtacagctcgctcatgctggaagaggcgacccaccagaacgagttgccgccggtccgtcacacgttcctgcgcctgttggccgcgcaaatgggcgtgggcggcgacgattcatggggcgcgcccgtccatgagcagtaccagctgcccgccgatcgcgcctacacgctcgacgtgaatctggaactgttctaacagcgataaagaagctccctctgacgagggagcttctttatcgtgctggtacgaaactgtcacgcactactagggtggtggagatgaaggtgtggtggtgcagcgtgcgccgactggagatggcctcggcaagcatcgtaatcgcagtatcggccagctcattctgatcgatatcgtaactggtcaatgtcggcgaagtgtactgggcgatggcctggttattgatactgatcacactggtatcgcgaggcaccagcactcccgcagcggtaaacgcctgcagtacgccgactgcaatcgtgtccgcagccacgatgaacgcatccggcatgtcatctcgatgatcgttagccgctttctcccctagagtgcgcccggtgtccacagtgaacgcgccttgcgcgtaaatcaggccttccgcatccagccccaaacgctcggtccaattgcggaatgcggttaatcggctgtcttccgggtattcgtgcaaacccatcgtgaagccagtaccgccgatatagccgatgcgtcgtttgcccgaggacaccaacacatccaatgcgtccaaaatggtttggcttaaatccggttgcaccgaatcgaacaggccgggcgcaggattgatgtcgatgaatacgccataaggcaataccagatggagtttcaacagttcatccgaagaaggtacggacggtccgatggaaatgaagccgtcgaaatcaccggcgttggcaatcagatcgtcgatatgggaaaacgacgtgagttccatgtgctgggctctggcattgtcgccgagcacggaccgcagttcatcgaaataggcgtccgccagttcttcctcgcgggtggcgttgtcgagtacggccacacggcgtggcaatacgatacggcgtgatccggtagcgtagccaagctgctcgctgacctcgatgatgcgacgtcgcgtctcctctttgacagacaatgtcgggtccccattgagcagccgggataccgtggcctgcgagaaacctgattcctgcgcgatttccttcatcgtgaccatgacatcatcccctcaatgcaaacattacgtagtacttcagtaaattactttactacttagcgtaacgcgcaaagcccgcaaccggaatacaccggtcacgggctttgcgatatcaatgtcacatcagcagacgatatgacctgacgtcagctctcgtcttcggcgacgcgggagcggctgtagatcatcttcatcgagcagatgaagataaccatcgcacccaggacgatgatgccgccgaccatgaagacgttggcataggtcgaggccggaccggattcggtgccgaacagtgagccgccgctcatcgcgccattggccatgagctggccgaagatcgcgacaccgaccgaaccggtgatggcctgcatcagatcgttgaagcccaatgcacgtccggattcctcggcctccacggtcagcgttgcggtatccacaatcggctggtagaagaacgaggtgccgaagtagtagatgcacggcgccacggcaagagcccagatctggcccatcggaatcaggaacgcaacggcgatcaggccaccgcccatgcaggcgagcgccagaatgatggaggccttgcggccgatcttctggatgatcgggccagcggcgaagcccatgatggcggcgaggatgatcgaccacaccagcaggttggagacctgggaggagtcgatgccgtacacgttcaggccgatggcgttgcagccggcgttcagggtgtagctgaagaagtagccgacaaagatgacgatcatggtcatcgcgaaggccgggttggtgagcatctccggggtgatgaacggatccgcggccttgttgatgtagaccacgaaggccacgccggtgaccagcaccgcgataccccagaagatggtcatgtcggtgaagaacatggtcaccgagccggcgaacaggccaatgagcgtgaagccgatcacgtcgacgcgcgcgcccttggcatgctcgtcaggcaggttcttggccaggatcgggatgaagaacaccgcgatgatgccgataccgaagaggatgcgccaatcgacaagggtcatgtagccggcaaggaagacgcccagagccgcggcgatacggaacacggcgacgaacacgccgtaccagatgactcgcttcttcttctcgatgtacttggagacgagcaccaggaagatggagccggagacctgccagcctgcggactgcacggtacgggcggcgatgacgatccagatgctcaggtcgccgaagcagccgaggatcgaaccgagcacgaacacgatcgtgccgagaatcatcatcttcttcagggacacgaagtcaccgagagaaccgtagatcacgcacacgatgccgagcacgatgcccggaatcgaggtgatcaacggggcgaggttggcctggccgagctggtcgccgatgttcacatagatcatgccgaaagcctgctgctgcagcacgcccatggtgaagatgatcagtacgatcggaatggcgatctttgccatcttgttcatacgggcaaactcttcggtgccctcctcaggcaccgggataccgttcgccttctccttgacagcggtttctgccatggtgattcctttctattggtttgagtttggtggaatgccttatgcgcgagcgcaaggagtaaaaacagctacctcctctcgcatgggaatcgacggcgccgcgcctcttctggataccgcgagggccgaggccttcgcggcgaaatcaagtgcatgggcgatgggttcgccggacatcaggtcggcaaggagataaccagtgaaggtgtcgccggccgccgtggtgtcgaccgtgtcgacgagataagcggactgcgtgacgacgtggtccccacgcaaatacatcgaaccgcactcgccgagggtgagggctatatccgcctgggagaaacgcgcacgcatcgcacggatcagtgtctccccatcttcttcggcccctgtgagcatcgccgcctcgccctcattgagtacaaaacagccgatggcatcaagatcgacttcgtcgagccgcgagtcagccggcgagggattgagcacgatgaacatgccgcgggccttggcgcgggacacgatatagggcagttcgctgatttcgttctgcagcagcagccaatcgcccttcccatacccgtcaagcacctgatcgacgaaatcacggtcgatggcacggttcgcgccggggtacagcacaatgcagttgtcgccgctggcatcgttttggatgatggcgttgccgctgcgcacatcatcgcgcactaccaccgaggtcacgcccaccgcgcaggattcgagcaggtcgcgcaggaacatgccgtcccgtcctacctggccggcatggtgcacatcggcgccggcacgagccaatgcgatcgattgattcagtcccttgcctccggggaacacgtcgagcgcatgcgaggtgatggtctggcctttggccgcaaaatgatccaccccgtacacatagtcgatgttcagcgagccgaaattcagtatgcgcatcaggactcctttcccatgacgggaccggtgacagccagttcgtagatgcgacggcaatcgtcgcgatcaaggcgggcaatggacccgatggtggcgtccggcccgtagaaatcgatgttgtccaacatgcgttcgatgccgtcgcccggcagatcgaagtccttgaaggaaacaggcatgcctagcgagcggaagaacgattccgttgcggcgatgccacgccgggccagttcggtttcgttcatcgagccgggcctgatgccgaatacctcagtggcgtatcgcgcgaaacggaacggggccttctcgctggccacgcgcatccaagatcccatgatgattgacagggtggccccgtgaggggtgtcgtatagcgcgctcagctcgttggcaatcaggtgggtggaccagtcctgttcacgacccacgccgagggtgttgttctgcgcgatggtggagatccacatgatttgcgctcgcaagtcgtaatcggcaaggtcggccaacgattttgggccgacatcgaccaaggtgcgcaatgcgccttcggccatacggtcgattacgccgatctcgttgtcggcgctgaaataccgttcgcagatgtgggagaacatgtccacaatgccgcaggcagtggggaacgccggcaccgtgacgctgagttcggggttcatgaacgcgaatgccggccggagtactggttcgctcagcgtgagcttggaatgctcatgctcattgttgatgacggcgacctggctggattcgctgcccgatgccgggcacgtcagtaccaccgcgacgggaagggtgcgatctaccggcactttgccggtgaaataatcccatacgtcacgctctccggcggctcccagcgcgattgccttggccgaatcgatgacgctgcctccgccgatggccacaacggcgtcgacattgcgggctttggcgatggcgatgccttcacgcaccagcgtcagtcggggattcggcttcacgccgccaagctccgtataggaaatgccggcccgtccaaggctgcggcgcacggcatctagcaagccgctggtttccagatatgctccgccatcatgatggatgagcacgcgggaaacgccctttgcgcccagttcgtctcccactttggtttcggcgtcgcgcccgaaaacgaaggtggttccgatgcatatggtgaaatccctcatatcatgctccttgcgtgtatgacggtgtccgtcatgatgtcgttgagttccgcgatgtcgtgcgccacatatgcggggtttctgctgagcaacgcgatttcgtcgccatccccgtatgtgaccgctatgcaggagatgccgttggtccgtgcagcttcgatgtcgctgaaggtgtctcccacatagaggcattgtctcggcgcgatgccatgccgtcgaacgatttcggctatcatttcgaccttcgtcgcctcacggccgggtatggaatcggggcagatccaatcgtcgaacaggttcgcccagcctttgctgccgagtatgcgcctcaatgcgccctccggcttgttggtgacgatgatattgcgtacgctatgtcccttcagctcattcagcatgctctgaatgcccggatagagtctggtgcgcgaaaaatcattgagcgtgcggtagtgtacgcgtacatcctcatcaaatgtctccagatacgcctccccgggataggggatcacgtgccgcatgatctcatccatcggatcggccagattggcgtcatcgcgcatgtacaggtcatcgatcgccccgcccgcacgacgcgcggcgtacgtcagggaattccacacgtcgctgccagtgtcggcaagggtgccatcgaaatcccataacaggcatcggtattccattggattgctcctttcgttcattcgcatggcggtggtcgatgattggaggcgagataccgccggccggccagaaggggttggagtcgccggccggcggtggagggggttgttcaggggcaagactcagtcgtagttttcgagggtgctgttcagtaggtcgacgaatccggggaagtcgagttccagcgcggcttccgcattcggctcttcgccgcgatagcccatcgtcggcgtgcgttcaagatccacggcaggcacggtaccgcgcagatgacggtagtcgcacacggtcataccgcgggtaagtgcgccgtgcagctcgatatcgatatgcatcgggaccgcagtgatcagcgacgggtcgataacccatgccaccgcgcatgcgtcgtgcatggtggcgcccgtcagctcggactcctcctcgcatgcgccgatgaagaaatcggtcagatcggcggccaggttcgcggccttggtgccgatctcacggaacttggctacgtgcttggcggtcagctcgcattgacgggtcaggttgatgccagtcatcttgacgtgcataccggagttgaacacgcgcgatgccgcctcggggtcgacgaagatgttgaattcggcggcaggggtccagttgccgtaggtgacggacccgcccatgatgcacagctccttgacccgttccacgatgcgcggctcacggttgatggcggaggcgatgttggtcagcggaccggtggcgatcagcgtcacgtcatccgtgctcattacggtgtcgacgatgaagtcgaccgcatgcttgttctgtgcggcgtgcgtcggctccggcagcacgggaccgtccagaccagtctcgccgtggaactgcggtgcggtgaccagcggtgcgaccatcgggcagctgtgccccggatatacgccgatgcggtccgccacgccaaggacctcaagcaccttgatggcattgcgggtcacgttctccagtgtgcagttgccgccaatggtcgtgatacccagcacgtcgaggtgctgcacggcgagcatgatgccgaacgcgtcatcgtgtccgggatcgcagtcaaggatgaccttcttcttgttttccatagggatacctccgttggttgtgttctttggattggtcgatattcgggcatggcgttcagccggtttgcccggcgaggaactcgtgcagctgtgcagcgtccggcgaggaacgtgccccgcgacgggccactttgtatgcggagacggcattgccctctcgcaatgattcggcgagggaggctccggcgagtctggcagcgatgaaaccggcgttatagacgtcccccgctccgatggtgtcttcgacgttcacccggaacgccgggctttccgtcaggccgtcttgcgtaagaccgatcgatcctcgggcgccgtcccggacgatgacggtccggccgtccaccgcataggccgtggcgttgcccatcatgtcgtcgttgcctaaataggcgaactcgtccggccctgatcccagcagataatcgacattcggaataatgcgttcgagtgcagccgcgaaatcggggtcgagcacgccgtcgtccacacgcaggttcaggtcgaaagatgtagggactccggcatcgtgggcctgttcgaagatgcggatgatcgtctccctagcgctggtgtcgtaggtcaggcacatgcccgaggagtggacccaatccgcctcacgaatcatgtgcatcggcacaaggttttcgtcgagcaccttgaacgattgccgttcgcgaggccatccccacaggtacctctctccgcggtcgtccacgaaagcgaatacgccgaccgtgctcagggtcgaatccgcaaccagcccggtcacgtccacgcccgcatccttgaagtcctgcataacgaaacgcccgtactgatcatctcccacggtgcccacgaacgatacatccaggccgagcttcgccaacgccacggccgtgttcgccgaggttcctcctccctcgatgccgatctgcggatattcgacctgcgtgcgctcctcgttgagaaaacgcggatagggcacgatgatatccacattggcatcgccgacgacaacgaccttaggcatctttggccgccttgataaaagcctcgaccttggccgggtccttgcaccgatccgtatcggcgcgatcatcgtcgtaattggtcagggagaacgagtcgacgccatacgggtgcgtggcataaatcgcctcggccacattggaggcgtccagaccgccggcgatgatgcacggcacgtcggtggcctcgatgatggcccggtcgatggcccggtcatgggtcaggccggtcgctccgatgtctccggcagcaggtgctttggtgtcgatgaggaagaagtcggaaaccggctcatagtccttcacatactgcatgaccttctgttcgtcgagaggcactccggctagcaccgggatggcctgcatgatcttcagttcggggaaccggctcttaagttccgccacttcggccggactgatgccttcgatgtcgccggacaggtgcaacacgtcgggcatggcttcgcgcaggttctcgctgatttcgtcgatgtcttcggcgacggtcaggcctatgcgcacggcttgtggttgcacgccttcgaagatttccctggcccgttcgcaatcgagctgaccgggcgtccgcttgattttgccgtaggagacgccgatatgttcgccgcccatgtcgattaccatgcgagcgtcctcgacattccttattccatagatttgagcaatgacatcagccacgatggttcctttcctgagcaatggcgttgatgaacgcggggacggagaataccgtctccttgaggcctgcaccctgagccactcgggtgacgggcggcggcgtcacgaaggaacgccgaagtgtgtcggtctgggcaaacacctcgcgggcctggccatcgagcagcacgcggccgtggtacatcacgatgacacgggagaagttcgcggtgacgaatttcatgtcgtgcgaaatcgtgatgcagagtctgccttgtgctttcagacgttcgatgatgcgtgcaaggcgggcgttgcccgacgcatcctgaccgcacgttggctcgtcgaaaatcaccacggatgggtccatcatgatgacggcaccgattgtgcagaatttcttctcggtgggcgtcaggtcgaatgggtgcacgtcgagctttttggtgaggcctaccagctcggcgatgctgtccacgcgatgcgcgatgtcctgatcgctcatgccgatctggcgcggaccgaattcgaattccttgcggacgctttccagaaacagctgatcgtcgggattctgaaagacatagcccacgctgcgagaccattcggcggtgctgcgctcattgacgtcaatgccatcaatcagcactttgcctccggtggggcgcagaatgccgttgaaatgcttgaccagcgtggtcttccctgcaccgttctgccctatgatcgccaccggctcgttgccgtcaagtgtcaagtccactccgtcaagggccttgtcccctccgggataggcgtgctccagtgcctgcaactcgattttcatgagagcgcctccttggccatgcggatggccggctcctcggtaatggcaatcgggccaccgagcgcacgggtgatcttcacgtaatcgggcacttccacgccatgctcttcgatcgccggatcggagaacacctccatcggagagccaagggccacgacttcgcctcgctcgagcaccatgacggtatccgcgtatcgtgccactcgctccatgtcatggtcgaccatgatgacggtgacgccgtccgcattgagctgtttgacgatgtcgaaaatctcctcgctgcccatcgggtcgagctgcgtggtgcactcgtcaagcaccagaatgcgcggttccatgatgaaagtggatccgaaagccacacgctgcacctgtccacccgacagttccagcgggttcttgtctagaatgtggtcgatgcgcatcaatttcgccacagcttcgacgcggtcgatcatctgcgctctgggcacaccgtggttgcctaatccgtaggccagctcttcggcgacggtcccggcggtgtaggacagctggttgaacgggttctgaaacaccaggccgatggtcttcgacagttcggcgatggtcgaatcggcgacatcggtcccgtcaattaggatgtgtccagcccccgcccccacgaaatagtgcgggatcaggccgacgagcgcattgcataacgtggatttgcctgccccattcgcgccgatgatggtgaagaagctgccttcctcgacctggaagtccacgtgtttgacggcccgacgcttggtgtcgcggtacttgaaggagaaatccttgacctctactatcggactcattcacttgcctccccacgagaccggcaacggaatcacaccgatgcggatgcatacggaaacggcgaccacggcgatcagaaacaggacgaagatccaattgagtaccttgtcggcggcattccagctgaccttgacataactggtctgcttcactccagtaatgccgaagccgcgagtctccagggtcataccccgctcctgggcgtcggtcagcgatgacatgacaaccggaccaagcaacgggatatacgccttgatgcgggcgatgaccccacccgatgcatcgagtccgcgagcggattgcgcctcctgaatcaccgccatacgtcgttgcatctgcggcacgacattcaggctggcgagcaccaggtatccgaccttggcgctgagccccaccgaagtgagcgcggataccatagcaccgacataggtggttttgttcatgatgtagaagctgccaagaaacaccagcaggctcaccaccactttggccgcatacagcacgccttcgagccccagttgcgcgaagccaaaatccagtaatgcggtacggttcttgggactgtacagcccttggatgaacatgagcatcacagtgacggggatgccgaaaccgaacattatcttggcgaaatcacgctgtatatgagccaagaacgagaccacaagcagcaacaccacgagtatcagaccaagcgtgaagtcaggccatgccaatgcggacagacccaaggcgaacacggccgctatcttggtgatcggattcagcttcccaattacggtgtcattgatgaccggcatatgcgacgacatgtcttactcgtcttcttcttcgtcatcatcactcagcgcatcattgtccgagccgcccatggagtcggccgcatactggctgagaaagcgacggggaatcttctgcacgatcacccacgcgatggcgacagtgatgcccttgtcgaggaggttctcgatcagcgacgaggagatcaccgaggcgagaatgtctttcatggccacgaccagcgttgccgtcagcaccgatgtaccgttgacgccggtggcaccgccgtatacgaatgtggtgatcagcgatgcggagatcgcattgacgaacgtgcacaccagccagatgaccacgacgccccacttcttgtggaacagtccggccttgaccatatagccgacgaccaaaccgcacaataccgacaccgccgcatagggaagatagaccgggttggctaccagtgccaggaaaagattggtcagcaggccggtcagggccgcgacccatggtccagacaggcatgcgacgacgatggtgccgatcatgtcgaggaacagcggcagcttgagtacggagcacagagttccgccaatgagattgattccaaccgcgatcggaatcagcaccaggcactttgtggagaattgtgccttgatcccttcccagaacgacagcttccttgccatgctggccctcctttattttccaaccctcggttttccgcagtgtgcaatctacattgtttgtcttgcggaatcttaggaaatcattttcctaaaatgttttcttgagataagattataggacgccaacgtcagtgtcaacacggcgggtcgagggtcaagcaacccggaccgaacggcccacaatggcgacgtagcaaggaacagaacgctacgcccttgtacactgatacagaggaaaacaggcaggaggggagacatgaacatcagggacatcgcacgcatcgcgggcgtctccacctcgacggtctccaaaatcgtcaacggcaaggattccagcatcagcgaggaaacccgcaagaaggtcctgacgatcgtcaaggaatatcattacaagccatatgcctccgcctcacagcgcacgcgtagctacaccatcggagtgctgctgcgctcccccatctccttcgatagcacgctggacggcatcatccaggccgcccagaacgccggatacgcaaccgatgcctacaacagctattccgatccggaacgcgagctcaaaaacatcgcagcgatatgcggccgcaacgtcgacggcgtcatctgggaaccggccactccggacagcctcgcctatgcctcgcaattccccgaaagcaccccactgctgaccataggacccaacggcggcgaccagtcactgctactgccttataaagaagcggcctacaaactgaccagcgagctcatcgaacgggggcaccaacacatcgcctgcctaatgaccaagggacgccgcacgcaggattttctcgaaggctttcgctcctgcctgttcgatcatcagctgccttatagcgacgatctggtctactacgacctcaacgactcgctgcccggcaaaatcggaagccgggacatcaccggatttgtctcctcgcattaccggcgagcactcgagttcacgcagatgatcagccccctgcattaccggcttccagaggatgcttcacttgtctccatcaaaaacgacaccgccgaagcgctggcctatcccggcaacacggaaatatctacctacaccatccgcaactccgacttcggcgcctacctctgcgagaagctcattgcgcagatagagcacgacaaagagcagcatccctcgttcgtacaggattttcatctcgacaacaccagcaccatcgcagccccgcccacttccgccatcaaacatgtgttggtcgtcggcagcatcaatattgaccactatctgtcagtgccgcggctacctcatatcgggggtacggtatccaccaaatcggcggcgcgctaccccgggggcaaaggggtcaatcaggcgatcggcgcagccaagctcgggcaccgcgttacccttatcggcaatgtcggcgtcgacaatgggtccgattacatcttcaaggcgatggaacagcatggggtcaatacggccggtgtgcgacgctgcgccggagaggacaccggctcatcgttcatattcctcgcccccaacggcgaatcggtcatcgcgattctctccggagccaacgcgtcgctcaccccggatgacatcacctccaacgaacgcctgttcgacaatgccggatactgcctgatacagaccgaaataccgttggaatcagccaaagtcaccgcgatcaccgcccgacggcaccatgccaaaaccattatcaagccctcgtcatgcgactatctgcccgactccatcgtcgccaatgccgacattctcgtgccgaacgagcacgaactggcgatcatcgaaactgagggaaaaacaatggaggataaggccgcgcatcttctcgaacgcggcgctggctgcgtcatcgtcacccaaggagaacacggctgctacctgcgcggccagaatgtcgagtgccactatccggccgctgacttcacccccgtagacagcaccggagccggcgacgcgttcatcagcgcgctcgcctcgtatctgatgtacggatacaccgtacggcaggcggtcgaaatcgccacctatgccgccggatactcaatcacccgcaaaggcgtcataccctcgcttatcgaccggctctcgctggacgcctacgtccatcacagcgaacagtagcggcacgggtatctgtcttaaggcagtttccaccgcagacaattaaggggaaccgcatctagtctgcggctcccctcagtcagcttcgctgacagctcccctctctgaggggagccaaaaagcactactccaactccaccgcgccggtgtacagctggtagtactcgcccttttgcgcgatcagctcgtcatgcgaaccacgctcgatgatgttgccgtggtcgagcaccatgatcacatcggaattgcgcacggtggacaggcggtgggcgatgacgaagaccgtacggcccttcatcaggttatccataccagcttgcacaacctcttcagtacgcgtatcaatcgaggacgtggcctcgtcaaggatcagcgcaggcggatcggccaccgccgcgcgagcgatggagatcagctggcgctggccctgggacaggccggaaccgtcgccttcgagcaccgtgttgtatcccccgggcagcatgcggatgaagctgtccgcattgaccagacgcgcggcctcgatgcattcctcatcggtggcgttcaggcggccgtaacggatgttgtccatcacggtgccggtgaacaggttcacgtcctgcagcacgatgcccaaagacctgcgcaggtcaggcttcttgatgccggccacggagataccatcatacagaatctggccttcctgaatgtcgtagaaccggttgatgaggttggtcacggtggtcttgccggcaccggtggcgccgacgagcgcgatcttctggccgggcttggcgaaccaggtgatgccgtgcagcaccggcttgtccgggttgtagccgaaggtcacgttggtgaagcgcacgtcgccgcgcagcagggtcagtcggccgtcgggcgaggtgatcgcctgctccttggccttcatcgccacctcgcgggccgagcccttgagcttttctgcggccttcagagacctcgtaccgtcgtcgccgacctcgcgcttccatgcccagtggccggtctcgtggtcgacttcggtcatggtgcggccatcctcgccaagttccacgttcacgagcgtcacggtgcccttgtcttcctcgatgggctcatccatcagcttgaagatacgggaggcaccggcgagcgccatcatcaccatggtcagctgctgagagacctgaccgatcgggttgatgaacgagcgggacagggtcagcagggagacgagcgtgccgagggtgagcggcttgacgccggtcagaccgatgtcgttgacgccggccagcgagacggcggcgccgacgatggcaagcaggatgtagagcaggtagcccatgttgccgacgaccggcatggtgacgttgccccaggtgttcgcttcggcggacgcctcgaagagttcctcgttcttctcgtcgaaggtcttctgggtggcgtcttcatggttgaagaccttgatgaccttctggccgttgacggattcctccacgaaggcgttcacgtcgccgatccactgctgctgcttgacaaagtagcggccggagcggctcacgatcttgcgcacgatgaagtagagcagaacggtgaacacgattacgaacgcggtgaatggaatggacagccacagcatggacagcagcgccgcgaccgcggagataatcgaggagaacatctgcgggaacgactgcgagatggcctggcgcagcgtatcggtgtcgttggtgtagtggctcatgatgtcgccgtgctcgtggctgtcgaagtagcggatcggcagcttctgctggtgggcgaacatgtcgtcacgaatcttcttgagcgtgccctgctcgacggtgacgatcagccactgccacagccaggacgccacgatgccggccacatacaggcccgccatcaggctgatggcccgcagcagcggggcccagtcggagttcgactcccccaccatcggcaggatgtacgtgtcgatgagcgactggaggaacagcgcggaaccggcctgcgcggcggcaccgaccaagatgcacaccacgatggcgatgacacgccacttgtactggaagatgtagctgaagatgcgcttgatggtgccaggctcggctttgcccatggcgggcttgcggttcttgaaactctggtcgttgctcatcgtgcttctccttccttggtatcggctgcattggcatcagctgcgctggtatcggccgtgggcatggtcactgtcaccgtcacggtttcggacggctcagcggtagatgactcagcagcctgttcggcagcggccagttcttcgggctgggcctggttcttggtctgggattcgtagatggaacggtattcatcgcaggtggcgagcagttcgtcgtgtgtgccggacgccatgatgcggccggaatccatcaccagaatcatgtcggattcctgcacggaggccacgcgctgggcgatgatgatcttcgtggtgtccggaatctcgttgtggaacgcggaacggatcagcttgtccgtcttggtatcgacggcgctggtcgaatcgtcgagaatcagaatcttcggcttcttcagcagcgcacgggcgatgcacaggcgctggcgctgtccgccggacacattggtaccgccctgctcgatgtacgtgtcgtacttatcggggaattcctgaacgaatccatcggcctgcgcgagctgcgcggcatggcgaatctcttcatcggtggcgttcgggttgccccacctgaggttttcggcaatagtgccggagaacagcacgttcttctgcaacaccatggccacctgatcgcgcagcgcctcgagatcgtagtcgcgtacatccacgccgccgaccttcagcgaaccggagctcacgtcgtacagtcgcggcacgagctgtaccagagacgactttgccgaaccagtaccgccgacaatgccgacggtcatgccggagcggatcttcaggttgatgtcgtcaagcacgggcttttcggaactgtcggagtagcggaaggtgacatggtcgaattcgatggagccgtcggccatgtcagtcaccggctgtgccgggttctgcaccgtgctttcctcctgcagcacctggcagatacgctcggcagaagcctgagaaataatcaccatgacgaagatcatggacagcatcatcatggccataaggatctgcatggcgtaggtgaccagtgcggtcaggtcgccggtggtcaggcccacggcggggttgttgccggaggcgacgatctgctgcgcgcccatccatgcgatgaggatcatcgaaccgtagatgcagatcatcatcagcgggctgttgaagctcatgatgcgctcagccttggtgaagtccttgaagatgcgctgggagatgcggccgaacttggagacctcgaaggattcgcggttataggacttgaccacgcggatgccctgcaggttctcgtcgaccacgttgttcaacgcatcgtaggtgtgaaacacgcgctcgaacaccggatgcacgagcacggccagaccgcacaggccgatggccagaatcgggatgcaggccaggaacaccatggaaatcgacggggagatacggaacgagaacagccaggatacgaccaccataatcggggcacgcacgcccagacgaatgatcatcatgtaggcgttctgcaggttcgtcacgtcggtggtcagtcgggtcacgatcgaaccggtggagaaccggtcaatattggtgaagctgaagccctgcaccttctcgaactggtccttgcgcaggttcttggcgaagcccgcgccggccacggccgcgtactttccggacaggaagccggcacccagcgaaaccatcgagcacaccagcagaatcacgccgaacttgacggtggccggcatgctgccaccggtgataccctcatcgatcagcgaagccatgatggtcgggatcaggatctccaggatgccttcgaccgtcacgaacaccggagccaggatgctggctttcttgtattcacgaatcgactggcccaacgtgcgcagtacatgtttgggcttgtccggttcgacggctttgcgcgcctgcgcgattgcctctgcggtatcgctcattcgttctcctccttcgtgttagcaacctctgctccgtcttgatcgggagccatcaccacaggtgactgagggagtgtttgatgttcaaattcatgttgtgcgcggtcgatgttcgcgcgcatgcgactgacgtagtcacgtagggctgctttctcgctttcggagaaaccctccaccagcagccgttcgacccgttcgccgttcgctttgagatcggcgacgatggcgtccgccttatcggtcaggacgatacgcttgcaacgggcatcatgcgccaccgattcgcgggcaataagccctttcttttccataagcgccagcacgcgcgaagcggtggagcgagtgatacagaacttctgttcgatggcgtgctggtagatttcacgattccggttacgagccaggaacatgatgatatgcgcgttgccgccagtggtctccttggcggaaagcggcatgctctcaccgagatagcggtcgacggctttggtcaccgcacgcatctcaatgctgagaatatgctgatccattgtcctccgtaccatgcggaggccgtgcgcgtatgcgccttcaccccacattgttgtatacgcaacaattcatgataaagagacccatatacaacagttgcatatacaacaatcggcgtgttgtagtatctccaaacaactgttgagcctaaacaaagctggctcccctcaggagagggaagccagctgtattacgccgtgcgattgcctcgcttcagcccttacttcgcgagcttggcgtactcgtcaaccatgaactgggcgatcttcttgccgccttcgcccagcagggtgggcagcgagttgatcggcatggggttgaggaacatgcgcatcatggcgttgtcgggcagcttcgtcagctcgccggcctcgccggcggcggccacggcggtcacgatcttggcgccgaacggatcggcctcccactcgccgtaggtggaccattcggtgagcggctgggtcttgccgtcgccatcgagggccacggcaacggtgtcggcaatgtcgcgggagctcacgcccacttcgatggcatattcgccggcctccacgtgccagtcgttgtatttttcggaccagtaggcgaacgcgcgctcgtcgaggtcgatggtcacggtcttggattcgccggccttgaggaacaccttggtgaagcccttgagctcgtgcttcgggcgggccacgtcggccttgcccggagccacgtacacctgcacggtttcggcggcatccacatcggaggtgttggtcacggtggcggtcacggtggcggtgttcgcgccggtcttggcggcggcgacgtcatcgatctcgaatgtggcgtagctcaggccgtagccgaacgggtagtccacaaccttgccgtaggtgtcgtagtagcgatagccgacgaacacgccctcgccgtagtcgacgtggccttcctcgcccggccagttcagcgtgctcgggtcatcgctgatgtccagcggaatcgactgggcgagcttgccggacgggctgacctggccgaagatcacatcggcgagcgcagggccgccggcctggccgagcagacaggattcgagaatgcccttggcgttcttggcccacggggccacggagacgacggagccgttggacagcacgaccacgacgttctggttcgcggcggcgacctgttcgagcagggcgatctgcttggcgggcatgtcgagggtttcgcgatcgaagccctcgattcaaagcatccggcgcacgactatttcgcggaccgcgagcgccgcagcgtgacgaacgcgctcaacatcaactggtcagtacccgacggcgcgaacgtggagcacgtgcttcaggcgggcctgtcgatgatggacggcattcagctgcgctggctgcgctctcccggtcgcgatctcaacgccatgtgggtcgactgcgaggatgtgctgttcccctcccccttatgggacggataccgctgacccttccgtaaatcgcgcgtctcgcacatcacctccgccaccgcgtcatcaatcaccgtcatcccgaaccatcaccccatccatcccgcatgccagacatgccgcagatcccaagggtcgaggcgcgtgtcgtccatcacggcggcgtccccgtcacccataccgggcgcgggaggcgcgagacggtcaaactcgccgcgaccgccgcgcagtcgatagctccagtagacctgaccggcggagacgttccacgcgtcgagctgcatggcggcgacgcggaggtagacggcgcggcggcgcgcggcgggcgacgggacgccgtccccggcgtcgcccgcgcgcgaaccgacgtcaccggatgcgccgtctccaacatccgcaccgccgtcaccgaacgcaccatatccgtcgaacgcaccaccagacgcatcaacggacgcgacctcaccttgcgccccgcactcccccatgcgcgccgcaagcccgttcgccacgcaccactcccccaccatgaccggcgtaaagcgcgcggcacggcggatgcggcgcgcgccccacgccgcgaacagccggtaccagcgcataagccatgcgtccggcagtatgcggaacagcacctcgggccgttccgacatgacgagatacgcgtgcgtgtcgatgatgacgccgcgcatgccctcacgtacgaaccagccgcgccagcggttcaggcggaatccgtcatggaacacgatgaccggcccgtcgcccagcaccgggcgcagccatcggtatgccgcccgatagaaccgtttgaggaagcgcatcggaacgtggccgctcccccgcgcctcccccggatccttcgcccgggagctcgacggcgacatgagataagtgagacggtcgaccggctcgttgagcacttcgatgccgtacaacgcagggcggtcgcggtaacgtcgcgcgagacgctcgagcacgtccagtgcgaacgcaacctgccgcggcgtcgtatgccagcggaccacgccggtcaggccgccattgtcgaacccgttctgcgacccgggcacggtgtgcaggtcgatgagcaccttaagcccggccctctccgcccagtcgaacgcacggtcgaggtattcgacgcatccgggatgcccgggcacgtcaccgaagatgaaaaacggcacggggatgcgcacaaggttcagcccgtgcgcggagatggcgcggaagtcgtcctcggtgatgtacgtgtcgcggtgacggcgcagcaggcgctccagttcggccgggtccgtggaccggtgcagccagatctcgtcctcctcaccgctcgcacggaacaggccgggcgtcatccaccgttccaataccagccagccgccgaggttcactccgttgattcgcccatcgtcttccggcatggccctctcatcagtattccgcatcattgctccgttccgcacaaacgacaccgcccgctccagcatacgaccggagcgggcggaaacatatgaggcccacacgaaaccgattcacacgggaccggctcacgcgagagcatctcacgcagagcagattcacgcgacggtgaaggtggtgcgcttgaggtcgtcgcggcgcgacgagtggccgatgagcagctcgaactcgccgggttcgacgatgcggttcgcatcggcgtcggcgatggtgcagtcgcagaccggaatgtcgaacacgacggtcgcggtctcgcccggttcgagcgtgacgcggcggaacgccttgagttcgcggtcggcccagctgtatgaggtgacgacgtcgcccacgtacgcctgcacgacctcggtgcccgcgcggcgccccgtgttggtgagggcgatctcggcgtgcacggtgtcggtctgcgcgaacgtgccgtccgcgttcgaggccccgccgacgatcgtcggctcaccgtacgcgaacgtcgtgtagccttcgccctcgccgaacgcgaacgccgggtcctgcgtaaggtcggcgtagcggttgccgtgctggccgcggatctggttgtagtagaccggcagctggcccgcgtggcacgggaaggtgatcgggagcctgccggacgggttcacctcgccgaggatgatctcggcgatggcctgtccgccctccatgcccgggttcggcgcccacaggatggatccggcgccggacttcggatcgttgcaacggccggcgagcacgccggaatcgcccacgatggaacgcggcagcacctgtggcttggagctcaccagcacggtgaccatcggcttgccggtctcgcgggagacgtcggcgagtgcgtcgagcagcgcgttctggccgccgagcagttcaagcgtggcggtggaacaggtctcgccgaccagctgcaccacatcgcccacgacggcgacgatgaggtcggcctcgcgcgcggcggcgacggcctcgtcgagcagggcccggtcaacgggcgcgctcactccgatcttcgggcgcggctggccgtccgggtagaactcaccctccgggtcgggcacgaggtcgatgacgttggcaccgcgggcgtaggtaacctcgcatccgtcgccggcgagcgcacggaagccgtcgagcacggtggtgatcatgccgcgcggatgaccgtcgggcatccagccgacttggccggagctgccggcccagtcgccgagctggttctgggcgtcgtcggcgagcgggccgaccacggcgatgcgcttgcgcgcgggcgcgtcaccggagccggggatcgcttcggccggcgccgcgtcgaacggcagtccgccgtcgttgcgcagcagggcaacggcctcgcgagcgagctcgaggttcacgcggcggtgatcctcggagccgatgacggccttgatgcgcttctcgtccggcagacgcgggtcctcgaacaggccgaggcggaacttgagcgcaaggatgcgcgcgacagcctcgtcgatgagcgactcgtcgagcagaccggtgtgcacggcctcgatggcgccgtcgtagaaccccggcgtggtcatgaccagatcgttgccggccttgaccgcgtcggcggcggcgtgcacgtagtcgggcttgaccttctgctcccatacggaacggcccacgttgtcccagtcggtgatgagggtgccgttgtacttccatgcgccgcgcagcttgtcggtgagcagccacttgttgaacgtgaccggtacgccttcgatggactcgtagccgagcatgaacgtgccgcagccctccttggcgatgcgttcgaacggcggcaggaaccaggattcaagcttgcggtggctcaggtccgcttcggaggcgtcacggccgccctgggtctcggagtatccggcgaagtgcttggcgcaggcgaggatcgcgtccttcggcagcgtctcgccggcctgggcaccgccctgatagcccttgaccatggcggaggccatctcaccgatgagcatggggtcctcgccgaaggtctcgtccacgcgaccccagcgggtgtcgcgcgcgatgcacagcaccggggagaacgtccagtgcacgccggtcgaggaaacttcttcggcggtggcacggccggccgcttcgacggccttcgggtcccagctcaacgccatgccgagctgggaggggaagatcgtggcgccgggccagaaggagtagccgtggatgcagtcgtcgccgatgacgagtgggatgccgagacgggtcttggtgttcacggtttcgacggcgcgcggcaggtcctcggggctggtgtgcaggatggagccgacgtgcttgttcacgatgagctcgtcgaggtcgccaccgcgggcgtcgagctgcatcatctggccgaccttctcttcgagggtcatgcgggagagcaggtcggcgatgcgctcggaggcgggcaggtcggggttcttgtagggcagcgtttcgactgtggtttccggtgtggtcgcggtcatggttgtgttcgcctttctgggttccgtgcggtcactcgatgacgaaggtgttgaaggagcgcggggcgagcgtggccttgaagccacgggaggcgtcggccgggtcggcgaactcgaacgggcgttcgtcctccagcgcgttctgggtcacgaccacgatggtgccgtccggattgcggaaggcgatggccatggagttgaagtggctggtggtgccgagcaccttcgcgccggggcgcacgtacttggagaagtggcgcatcacgtagtattcggggttgtggcgcacctcgtgcgtgtcggcggtgatggtgaacagggagttctggcgcgaccccggccagccgaccaccgaccggggttttcgtaatcctagaccaaacacacccggcacctggcaggccgcggccggtacgacaagggccagaacgcccgccaggacgctccggcccgaatcacggccggcatggaacccggtcagcgctggaacacgtcggggtgcttcggatctccgggaatatcgtcgagcaggccctcgaggccgaggaactcacgccagaagtcgagcggctggccatacgggttggattcgcggccgtgcgcctggatgttcgccttggcttcgaacacgtcttcctcggtgagcccgtcgaagtagctttcgagacggatgcggttggacggcacgtagtacagggacgcgatgatctcggtgagccgttcgacgcgttcgatcggcagcgaatcccagtggcggaactcgatgaagttcttgagacgcacgtcgttgaaatgcgtggagatgatgtggttgatttcgtacgcgttgagctcgcggtccgggtagacctcgccagcgttctcacggaaggcggcgcgatgcagctccttgcggctcagccccgattccaccgcttcgggcgtgtgcgtcaggtcggcgaacatcagcggcgtggacagcacgtcacgcgcgtagtcctcccagccgaaacgctggtcgaacaggccgggggtcacgttggtgcgctggaagtcgaggtagtcccacatgcgctggcgcagcagcggatacgggttgagacggccctcgaagtagggggtgttgcggaagaaccatgcgagaatcggcccgatggcggtgccgacgcgcatcttatcgatcgaatccttctcgtcgacatagtcgatgctcacctgggtggaggcggagcagcgcatcatgcacggaccgaactggccgacgcggccaaggaagtcggtcatcgcgtcatagcggcctttcggattgaccggcacgtcgacgaaactcgacttcggctggtatccgtagttgacgaaacggaagcccagctcctcgaggatcgggtccgcctcacaccggaagtcggcgtacaggccgttgaggtcgcccggctcatgaagcacgccgatggaagcctccacctggccgcccggttcgagcgacaccgcaacgccttcgcgcgcgagtccgaccagatggccgttctcccagtattccttgctttcgtcataatacggagcgagccgtttgaggaacgcttcgatgccgttcggctcgtagtagcttacggccgtgtcgtcggcgtcatgcaccggcagatgctcaatctcgacacctaaaccaccggtgccgcgcttggagcgccccgcctcgaagaacttcagaaggctctcgacatgcttcgggttcggctcggcgagcaggtgcgcatagctgattctgggagtgaccatgaacggtatcgtaggcgagtcgcgcgacgcgcgtcgccgcgcgcccgcgaatcggctatatctttttccgataaccggcacgtcgccggacatccgccatatcacgccgcaacgccgcaccgcgccgtcgcaccacaccgcgccgccacgcccccatcaccgcacgccacgcctccgcaacgccgcgccacaccgtacggctttgccgttatgcgcgatgtcggatacactcattgatttgtaaaccttgtttacagaaacgtccggcagagaggccggaccacaccatcaacccaccatcaacccacggcgaacagccggaataaaagaaaaacaacagaaaacaacagaacacggaaaacagcaacaacccatacaaaacaccggcaaccataagcacgtcggaagcacaccggaacgcacaccgaagcgcaccggcgaccgctccggttccacaccgaaaccacgccgaaggccataccggaaacggaccgaggacatatcggacacgcccggcaccccaccggcacgccggtgcgccacaatcgaaaggaaggaaagcggcatgacatcccgtcagggcagacaagccatagccgcgacggccgcaatgggcgtggccgtcgcgctggcgttgccgaccgctgcgttcgcgcagtcagcaacgcaaggaaaggagaccgctacgaccacgtcatcaggcaccacctactacgtgtcgtcggcacacggcgacgacgccaacgcgggcaccagcgaaaacgcgccctggaagtccctgaccaaggtcaacgacatcgcctcggacctcggtccgggcgattcggtgctgctggaatacggctccgaattcaacgaccagtacctgcacatcaaggacaccgccggcaacgccgacgcgccgatcacgatctccgcctacggcgacgccgacgaaggcaagccggtcatcgcgtcgaacggcgtcaaaggcagccagtgggagcaggactaccgtgccaacgtcggcaaccacaagaacaagggcaccgtctcaaccacgctgctactcaaggacgtgtcgtacatcaccgtctccaacctggagatcaccaacgacgacgcggacgtctacgatccgatcgacacgtggaagtggaccgacacccctgattccgacggcacaaaactcgaccgcagcgcctcgcgcatggaccgcaccggcgtggccggcatcgccgagaacggcgcgacgatgagcaacgtgacgctcgacaacctttacatccacgacgtggacggcaacatctacaacaagcacatggccaacggcggcatctacttcatggcccactaccccatggagaacacgagcgccgaaaccgacgtctggctcagggagcacgtctcacgcttcgaccacgtcaccatcagaaacagcaccgtcaaggacgtggatcgttggggcatcgccgtcggctacaccgcctacctcaactacatcgacgcgaactacggcgacggctccatcgacgacgccctcatcgcgaagtacggttccaccaacgtgcgcatcgagaacaactacgtcaagggcgccggcggcgacgccatcaccctgatgtactgcgaccgcccggtcatcgaacacaatgtgggcgacagcgtctcgaagcacatcaacacgcaggactacacgcagcccggctcctacggcggacgcgtggcggccggcatctggccgtggcgttgcaaggatccagtgttccagtacaacgagatgtacaacaacctcaacgccgagcacggcaacggcgacggccaggcgtgggacgccgactacggcgacggcacgctgtaccagtacaactactcgtacggcaacagcttcgcctcgctgatgatctgcaactggtacgcggttaacaccacgttccgatacaatatctcgcagaacgaccgtcagggcgtgttcgacctgccgtcgaacggccccggcaaccacatctacaacaacaccgtctacgtggacgccgacagccaggtgctgactaagcgttccaactcgcagtccctgttcgagaacaacatcttcatcaacgcgaccaacacgaagaagacggagacctggaaccgcggcagccagaacggcggccagacgtacgacaacaacatgtacgtcaactacgcgaacaagcccacctccgacgccaacgccatcgaggccgacgacgtgtccgcagtgcttgcgggcgccggttcggctccgacatccgccctcaagagcggcgccgagcatgcgcgcaccggcgagaaagccgcgttcgacggctaccgtccggtcgcgggctcgaaggcgatcaacgccggcaaggtcgtctccgacctcaacgactacgcggtggagaacgacttcctcggcaacgcagtcaagggcaggcccgatctgggcgccgtggaaagcgacgtggtgtccgtcacgatggcctcctccaagtacgagaccggaaccgaaaccgattccgggaccggtgacaagaccaaggtcatccacgtgaccttcaccgacaagaacccggtgaccgtcaaggaactgctctccaacgtgtccgccgacaagggcgtggacaaggccgtgtaccgagtcgccgacgccaagtccggcaagtccgccgacgccaggtccgccgagtccgaaccgaacatgctcgaccgcctgctctccctgctcccaggctccgaccggaacgccaaggacgacgagacgaagctcgccgactccgaaccggtccgcgatggcgacatcctgcgcttctccgccgaaggcacggacgagaccgacgagtacacgatccgccagcgcatcacgtgggattgggtcgcggactacgagcaaggcgtcgccgacttcgactggaaggcgcagcgccgcacgtccgccggcggcgagtggaccaccatctccgcatacgacggctcgtggccgaacaccgtgtacgaccagtactacggtgtcggcgtcaacggcaccctcgccgaactctccggcgaccgcaagcagacgcacggcctgctgatcgacaagcccggcgacggcctgcccacggccatggcgtggaaggcgccggagtccggcaccgtcatgctgtcgctcaagacgttcgccgacaagatcgctgaaccgtacctgcgtcagaacgcggacaacgccggcaagaaggtcacattgtcgctgatgcgcaacgacgagacgctctgttcggccgacgacctgtccgtctatcagaagtcctccgaacagttcgcgcagtgcctcgccgagcacggttcgatcgacgtgcaggaaggcgactggatccgcatcgtcgccgacgccgagaccggagtcaaggcgccgtcgctgcacatcagcccggtcatcacatatgaggacaaggcgcccgccgcgccgaagcagaacgtgcgctacgacgtctcgtacgccgcgacggacgccgtcgtcggcacgcagtcggccgtcgccgccgcgttcaccgcggacggcggcgaggccgacgcgccggacggcgtcgcgttcgccttcaaggacggcggcgatgagggcgaggcctcgcccgtcatcgacgcgtccaccggcgccgtcaccttcacgcccgccgccggacagtacggcgcgaccgtcacccgcaccgtcgtcgtcacgtacgcggacggttcgagcgacgagacgaccgtcacgttccgtgtcgcgcaatcgcacgcgcagcgtctcaacgtgctgtacccgaccgtgcgcggcgacgccggcacggacctgaagcgcacgccgaagttcacgctgaaggcggacggcgcggccgcgtctgtgccggaaggcacgacgttcgcgctcggcgcgaacgcgccggccggcgcgagtgtcgacatggcgaacggcacggtcacgctgaacagcagggtcggcggcaccgtcaccgtgcccgtcacggtgacgttcgccgacgacggcgccagcgtctcctccaccgcccgcttcgaggtgaccgcgcccgccgcgctcggctcgtccgagttggagaccgcgactgtcgacggtgtgaacgtcgtctacgcgccgttctccgccgacagtccgatgaccgtcgcgcagctgctcgccaaggtgacggccgaaccgtccggcgccgataagggcgtgtaccgtgacggcgtgcggttggaggccggcgcagaactcgccgagaacgacgtgctccgcttctccgcgaaaggttccaccgtgtccgacgactacgtggtgaagtcgaagaccacgtgggattgggtgaacgacttccaggtgcgcgtgcagggtccgatctggtacgggcagcgtcagaccgaggccgacggcgtgtggtcggatatcgccgacttcgacgcgacgtatccgaactggatgtacgagacctactacggtccgggcgtggactacgcgaaccacagcctgcccaccgaccgctccgccatccatggcctgatcagcgattcgcccgcgtccgctggtggctccgccatggcgtggaaggcgccgaaggccggcacggtgaaggtgtccatccgcgaggacgagccgtacctgcgccaggacggcagcaacggcaaggcgttgacgcttcgtctcatgcacgacgacaaggtggtgtgcttcgccgacctgaccgtctccaagcagcgttccgaggagttcgccaactgcgtcgccgacaagggcgagatcgcggtcgaggcgggcgattggatccgcgtcaccgcgacgtccgcgtccggcatgaacaagccgtccgcgcacatctccccggtcatcgcctacatggccgcctccacgccgggccccgaacccgttccggtggacaagtccacgctgaaggccacggtcgaggaggctctgggattggccgagtcggactacacggatgagtcgtgggccgcgctcgtcgccgcgcgcgacgccgcgcagaccgtgctggacgacgatgccgccaccgccgaacaggtcgagaccgcgcagaacgcactgcgtgacgccatcgacggattggagaagaagccggtcgatccggacccgaacccgaaaccggatccgaaccccgatcccgatccgacgcccgacccggaccccgaccccggccccgacaccaagccgggtgacggttccggcaacggttccggcacgggcaacggttccggcacgggcaacggttccggcacgggcaacggttccggcacgggcaacggttccggcacgggcaacggttccggttccggcaacggttccaccggttccggcagcgacggcgcgaccaccggcggcaagctgaccgccaccggcgccgacgtggccggcgcggccgcgatggtcgcgctgaccgcggccgccggcatcggactggccgccgcggcccgtcgccgcaggtgaccgatgccacgtaggcaccggttcgccgccgccatcgccgcagtcgcggtggcggcggtcctgctcgtcacattgaccgtcgccgtcgtcacgcacggcgacggcgccttcgcgcccgcaggcacgcctgcgggcgcgggcgcatccgccggcatcggctccgataccggctccaatgcaagcgaggattccgacatgttccccaccatcgtcttcggcgacaccgtcatcgaacgcaaggagtacgtcgcggcgctcaaggcgcaacacggcgcggcgcggctgtactttcggcagacgtacggcgtcgacccggccgaggacggctgggataaggcgcacgacggcgaggtcccgtgccgttggctcgcgagccgtgccatcgacgaactgcgacgtcggcacgccgcgtacctcatcggcgtggatctcgggcaggtggccgacgactcctatgcgagcatcgtcgcgcgcatggaggccgtgaacagcggcaacgcggaactgaaatcggacggcggcatcgtctacggccgtaccggcttcgacatcgacagctacctgagctacgaactgtccgcgttgaagaacgcctatacgggcgacgagtcgaaccccggcatgagcctgtccgacgacgaggtgcgacgctactacgacgagcacgactggacaaaggacggcgtcgacgggaaggctccgctggacgaggtgcgcggcaacgtgaaggcgcagatgcggtcggaacgttacgacgagctcgtgagccagcgcgccgaagcgatcgacgtgaccgacctgccatgggacgcgctgtaccggttcacggcaggcaggctcgggtaggacgggtgtgaccggtgccggccgaaaagcaccagaacgaataaggcgggtgtcccgttccatacggaatgggacacccgccttgtcgtaggccgcagaccggtttgcccggtctgcgccggtctggtgccgaccgggcgtcggttggacgtcggtttgaggtcagtcggcggcagtgaagccctgcggctcgtcgccgtcggcgaacttcgccttgtgcgccttcttcgcggccgcgatcatcagcttgatgcggttgagctggttcgcctcggaggcgcccggatcgtagtcgatggacacgatgttggcctccgggtgcaggcggcggatcttgccgaacatgccgcggccggtcacatggttcggcaggcaggcgaacggctgcgcgcagatcacgttcgggcatccctgttcgataagctcgaggatctcggcggtgagcagccagccttcgccggcctgcacgccgatcgacgtgacctcggcagccttctcgacgagttcgggcatcggatcgtcttgcttgaacttgccgtgagaggtggcgatggccgccttgatcggcgcgttgtagcggtcgaggctccaacgcatgagcgcgtacaacgtcttgttgccgccggtgccgagatacttctcgttccagtcggtgatgtacgggcgcgtggtcatgaactccatgatgccgggcaccacggcctcgcaatcctgcgattcgatgacgtcgacgacatggttgttcgcatccggctggtatttgacgaggatctcgccgaccacgccgacgcgcaccttgcgcggcacgtccttcaacggcagagcgtcgaagctcttcacgatctctcgggcgagcacggggtacggcaggtagcggcgcttgagccacggggtcttcgcggccgtcttcgagaagccgtggtgttcgagcgcctcgcgcacgatcacgtcccactgctcgtacaggcggttcgccgcgcccttctccacctcgtacgggcgcacgcggtacaggcacttcatgagcaggtcgccgaggatcagcgccttgacggtgcggtgcagcagcgcgggcgtcaccttgaagcccggattgtcctccaggccctgcgtggagatcgcgatgaccgggatctgcgggtaacccgcgtcgatcagggccttgcggatcaggccgaagtagttggtggctcggcacatgccgccggtctgcgtaatcgcgagacacaccttgtctggatcgtatttgccttcgagaatcgcgtcgatgagctgtccgatgaccatgatggccggatagcaggcgtcgttgttcacgtatttgaggccagtctccacgtcttcgcgcgaggcgtgcttgaggatgtcgaacttgtagccgccggagcggatcaccgattcgacgagggagaagtggatcgggctcatctgcggggcgacgatcgtgtagtccttcttcatgtccttgacgaacttctcacggtgcgcgtaacgggacatggtcgcgttgttgtggccggacttcgacttcgcggacttcgacttggcgttcgcggcatcgttcgtggtgccgtcgccgagcgcggcgagacgcacatcggcgatgtcgcgcttcgcggcgcgcttggacgcgtcgcgcatcgccttggtgagcttcgggttcgcggccatcgtcgcgtcgagcaggacctgacggcccggcgtgggcgccttggagccggtcttgcggaatccggtggacttcggcgcgttcgcgggggcggcggcgtcgctgccggcatcggccgcgtccacgggcctgtcggcggccttaaccttcgcttcggcggcggcgacggcggcctgcgcttcggcgagcgcggcctgcgcggtggcgagatcggattcggcctgctcctgcgccttgcgggcggcggcctgcgcggcggcgtgagccgcgttgcgcggggcgtcggactcggcggaaccggactcgtcggacgtggcgagcgcggccttggccatgcgcgccttgttcgcctcgcgttcctcgacggcggccttgagcgagcgcaggcggatcttcgccgcgccgaggttggagacctcgtcgatcttgagcagcgtgtacacgtcggccttgtcggcgaggatctcggccacctggtcggtggtgatggcgtcgaggccgcagccgaacgagttgagctgcacgagttcgaggcccggataggaggcgacgaagtgcgcggccgcgtagaggcgcgaatggtaggcccactggttggtgacgcgcaacggcatgcggttgacggtgaccttgcggtcgtcgacgtggcggaatccgttcgcgttcttcttgcgcgggtcctcttcgccttcggacaggaagtcggtcaggtcgagcttctcccccggctgcagttcgcagatcgaatcctcggagaggacgaccatgccgagcgcgcagatggtttcggggatgccgtggttgatttccgggtcgatgtggtaggggcgtccggcaagcacgatgccgcggcagtcgtgctccttcatgtaggcgagggctttgaggccttcctgctggacgtcgtgtttgaagaccttgtcttcggcgtaggcggccttgacagcagtttcggcctcttcgcggctgacgctcgcccatgcgaactcctcgacgatacggtcgaccatgagctcgtggttggcgaggttgaagtacgggtgcatgtagcgcacgtcggggtcacgcagttcgggcatgttcgcgccgacgacgagcggatagttggcgacgaccgggcagttgtagtggttgtccgtgttgggcacgaggttgtcctcgtaactgacgcacgggtagaagatcgtcttcatgcccttgttgagaagccatttgatgtggccgtgcacgagcttggccgggtagcagatgttctcggaggcgatcgattcgatgccggtttcgaacagttcgtggctggaacggccggagatcatcaccttgaaaccgagcgaggtgagcagcgtgaaccagaacgggtagttctcgtacatgttgagcgcgcgcggaatgccaatctcgcctcgggtggcgttcttgtcggtgaggcggcggtaggcgaagcagcgcttgtacttgtagtcgtacaggttcggacggtcggagcgtttcttcttggcatcgccgccgcgttcgcaacggttgccggtcacgaagcgggagccgtcggagaacgtggtgatggtgagcttgcagtggttctggcacagcttgcacacgtcgcgttcggtggtcatcgacatttcgttgagggcttcgccggtgaggattgacgagacggtgtggcgcacgccgtcgacgacgatttcgccggcgtgcgcggcggcgttcggctcgtcgccggcggcggactcctcagccgccgccgcgtcgacggaacgcccgtccgcgccgacgtgcgcgttgtcgtcgtccgcgatgtcctcgtagtgcatgcgggcggtgagggccgcgccgaacgcgcccatgaggccggcgatgttcggtcgggtgacttcgcgttcggtgagcagttcgaacgcgcgcagcacggcgtcgttgaggaacgtaccgccctggaccaccacagtgtcgccgagttcgccggaatcgcgcagcttgatgaccttgtacagggcgttgcgcaccacggagtagcacaggccggcagcgatgtcctcgatggaggcgccttccttctgcgcctgcttgaccgaggagttcatgaacacggtgcaacgcgaaccgaggtccaccggatgggtggaagccagagccttttgcgtgaattcctgaatcgtcaggcccatggacatggcgaaggtctgcaggaacgaaccacagccggacgagcaggcctcgttgacggcgattgaatcgataacgccatcggtgatgaccaagtacttcatatcctggccgccgatgtcgatgacggcggtgacgccggggctgaccatttcggcgccacgatagtgggccatggtctccaccacgccctcgtccaagtgcagtccggtggtgatgaggccttcgccgtatccggtggcgcaggagcgtgcgatccacgcgccttcgggcagctcagactgaatcttcttgacgatgttgatggcggcggtcagcgggctgccttcgttgttggcgtagctggaccagacgatttcacggtcgtcgttgacgagcgtggccttgatggtggtggaaccagcgtcgatgcccaggaagtgcgggccgtgcgcgccttcaagggtgccgatgtggatgtgttccttgtggtggcgcttgttgaagtcctcgcgatcggcctcggtggggaacagcggcggcatggtgggcgtgttggagggcaggttcttcagctcgtccaaacgcttcaggatttcgtcgcaggtgtaggcctcgaaatggtggccctgatcgtcggaatccgtgtcggcctgcaatgccgaaccgtaggccacatacaggtgggcgtcggtcggcacgatgaactcgtcgaccttgccctcaagcgcgcgctggaatgcggcgcgcagctcggacatgaagaacaacgggccgccgaggaagatgacggtgccgtgaatcgggcgtccggaagccaggccggcgatggtctgcgtggccactgcggtgaagatggaggcggccaaatcgggcttggcggcaccatcattgatgagcggctgcaaatcggttttggcgaacacaccacaacgcgaggcgattggatacaggttctcgtagctcttggccatctcgttgaggccggcggcgtcggtgtcgagcagtgtggacatctggtcaatgaacgcgccggtaccacctgcgcacgaaccgttcatgcgctgttcgggcgtgggtttcaggtaggtgattttggcgtcctcgccgccgagctcgatgatgacatcggcctgcgggtattccttgtcgattgcctcggtttcggcgatgacctcctgaatgaaaggcacatgcagattgtcagcaagcgccagaccgccggaaccggtgatagacaggcgaatcggttcatcgccgcgtccgaggtccacaagcttcttgtggatgtcgaccaacaggccggccacggtggcacgcacgttggcgtggtggcgtcggtaatcggagaagagggtgtctcccagggaatcggactgatcaagcaccacggccttgacggtggtggaaccgatgtccaatcccacacgcaggggcttcgggtgtgaagcgggctttacgctcgcgtcagtggcgatgtcaaccatgtgttcctcttaattccgacttccgggagtgcacgctttgaggcatcatgaaccgtttcgggacggctggcagataccctgcggacggcttcgcccggctacttcttatggaatattagtccgaccacctgcccaacatggcacgaggcgaggcgatttcgctcacgggaaggccttttcccaacagttccaacgatattgctgagtgcggcattccagaactgctactacgaggcctgttggccttcgccggcttcgcggtctttcaaatagatttcggggatatctcgttcttgatcgtggagcttggcccagatgaccggttcgccggcttccagagacttgggcacatcgaggatgcgctggtttctggagccgcggaattgcagcagcgagtccttctggtctctgaggtagcggccgtcgacgagaatgtcgatgagatgtagcaattcaagcttgtctggggtttctccggggcgcatgagttcttcccatgtgtagccggtccacgaccagatatctttggtatgaccgaattcctggcggatacgttgtgcgagcggcaccagcacgggagtgttgaggaatggctcgccgccaaggaacgtaatgccttgcacccatggggctttcagatcttcgatgattttgtcttcaagtttttgcgtgtattcgtggccggcttggaaatcccagatggaggcgttgaagcagtcgacgcagtggaaggggcaaccggagacgtaaagggagttgcgcacgccttctccgtcggtgacaatgaaggttttgtagtcggcgatcatccgcttggacatgcgccggccatcccattgaccggctttcggatcgttggcaagaccgttggagggtacggaggggccacgcccggtctcgccggccgcaaagtcatggcgcttgggttcgggcttggtcgtatgcagctccggcatgattccctccttacggaaagcattagctcccgctggcgggagctgtccgtcatcagacggactgagggtggtcaacaccataaaggatgaccgccctcagtctcgcttacgctctacagctcccgtcagcgggagcaagtataaaccctacttggtctcttcgaaccactcgcgagtggttccgtcatccagcgtcacacgaccggtttcgccgctcatgtgcttgactcggtgggcaatttcctcgtgacggccgtgcaccatcgggcgctggaccgggctgccgagatagccgcaggtgcgcttggtgacgttgcacttgtccgggttggagttaccgcactccgggcacttgaagccttcctcggtcggctcgaagtcgccctggaagccgcacacgaagcagtggtcgatcggggtgttggtacccaggtagccgatgccgatgttgtaggcgtaatcccacacggcttcgagcgccttcgggttgtcctgcaggcacgggtactcgcagtagttgatgaagccgccggaagcgtagtacgggaagtccttctcgtagctgagcttctccatcggagtgggctgcaaccacaccgggtagtggaaggagttggtgtagaagtcgtgatcagtcacgccttcgatacggccgaacttttcacggtccatgcggttgaagcggtcggtcagggattcagccggagtggagtacacggaatagtggtaaccctccgctttgctccactgcttgcacagctcgttcatgcgcttgacgatggacagcgcgaactccttgccttccggatcccagccgtggtcgcgaatccagttcttgccatagaagaccgcagtggtctcggcaaggccgatgtagccgagcgacacggtggcacgctcgttcttgaacagctggtccacgttgtcgttggcaccaagacgaccaaacgcaccaaagcggaacagggtcggggcgttgaccggggtggcttccttgcagcgcatgatgcggaactggagggcctgatgggcgacttccatacgctcgtcgaacagcttccagaagcgagccttgtcaccgtgggattcgatggcgatacgcggcacgttgacggtgaccacgccgaggttcatacggccgtcttcttcatccttgccggtctccgggttgatccacccctgcaggaaggagcggcaacccatcggagccttgaaggagcctgtgatcttgacgatgttctcgtagaacaccacatccgggtacatgcgcttggtggcggactcgagggcaagctgcttcagatcgtagttcgggtcacccgggtcggcgttcacgccgtgcttcacagtaaagacgagcttcgggaagatggcggtgtggtgttccttgccgaggccgcgaatacggttcagcaggattgcgcgctgcacttcacgagagaaccagtcggtgccgagaccaaagccgacagtcacgaacggggtctggccgttggacacacggttggagttgatctggtattccatggtctgcatggcatcatagatggccttgcgggtacgaatcttggcgaggatttcacgctcttgctcaagttcgtcaacgtcggtgtggaacggggtgtccatcggcagcggttcacgggaaccgaaatgcagcttggcgggctcgttcttcttggcgctctcgacctgacgacgggcgaattcaaccggcatgccgtcggggatggtctcacgagcttcctcaaggaacttctcgtaatccttcttggcatactgggcaagatgctcgtcggcacggttggcggtctggccaccatactggctggaggccacgtccttcatgatctgggtaatctgggtggccgcaatggcgatggacttcggggaagccatcggagcgttgccaagagtgaagccattggccaacatgtcccagaagttcggcaaggagcagttggactgggcagtgaacggcgaatagtcggcatcgtggaagtgaatgtcgcccttcatgtgggcgttggacaccgccggcggcagcatgttgaacgcggcggccttggacacggcaccggccagcagatcacgctgggtggagtagacgttggaatccttgttcgcgttctcgtgaatcagggtcgggtcatgattaatgaagcgagcaacggcctcgttgacatcagtggccttggcacgctgaatgtctttgtcgagacggtaattggtgtaggcgcgagccacatcgtacaggtgggcgtcaatgagggcgtgctccacgagattctggatgtcctcgattttggcggggccggtgtaacgccccttgatttcgccttcgacttggttggcgaaaccacggatcatggcatcttcttcggggccgacttccttgttcaggtcgccgaaagcagacttgaccgcagagatgatgttgatggggtcgaagtcgaccacacgaccatcacgcttctcaacgagcacggtggaggccttggcggccaccttggtctcgttatcggtgacggtttcctccagcacctgtgcgcccatcgggcacccctttcctataaggcgaacactcttccgagttccgcattttggccgcactcgacgtgggccacacgaaattacattgatgtcgttttcttgaacctctagaagaatacagcatccccacccctatatctagtgctcaacagtggcgtgtcgaactatttatagggttttcggctattttccgccaaaaccacaagtgtgtgattagcgtaactgttttctgctcgcgtgtcacacagcgagctcactgacgactctcaatcgtcagcgcaacgcatatctcactcctcttcatagcacccgtttcttcgccataatgactcctttcttctgatgcaccagaccatctccatcatcggctgacacatcgcttcgcacggttcttgcattcatcatcacaccgttttcaggcgacggtaaatttttaccgtcatcaaccagcgcacttatagtggagtgcatgactactgcaatgggctactcctctaccggccgcccaccgactgccgcttcactggcctcggctggctttgagccgggtcaaggcacattcgcgcccgatcagggcactatcaatctgccgaatgaacctcgccctatcgatcagctgcctgcacgcgccgctgaaaccaccgcgcaaaatccgtggccggtaagtgtgctgagccagaagttctacggtgccgtggaacgatggccgtccgcctgggtcaccggccagatcacgcagatcaatacccgtcgcaccggctcggcctacatcacgctgcgcgacgacttcgaggatatcgccatggaagtcaatggcttcggcaggttcgcggccgcggccagccagttcgttcagggcgaccgcgtggtgattcatggcaaaccgaacctgtggatgaagcgtacttcgctgtcgttgcgcggagacacgattctcaaggtcggagccggtggcagcctcaaggccatgatcgacgaattgcgcaagcggcttaagggcgagggcctgttcgatgccgatcacaaactgcctctcccggagtttccgaagactattggcctgatttgcgcacctcaggcacgtgcggaaggcgatgtgatcaccaatgtaaaccttcgttggccttccgtaaccttcaaggtggtccatgtgcatgttcagggcgagcaatgcccggccgaagtggttcaggccattgcacagctcgatgccgacccgaacgtggatgtgatcatcgtggcccgtggcggcggctcgtttgaggatctcatcggtttctcggatgagcgtgtggttcgtgcggcgtatgcctgcaccacaccattaatctcctccatcgggcatgaggatgactggacattgctggatctggtcgccgatctgcgcgcctccacccctaccgatgcggccaagcgcgtggtgccggatgtgcgtgagcagtcgcagctcatcgaaggtgccatcgaccgtatgcgactgcaggtccgttcgcgcgcggagaacgagatccgacttatcgagggatatgcgaaccgcccgagcctgacccaaccgcataccatgctcgaaccgcatcagcggctgatcgacgattccctgcagcggcttgacatcggcctgcggcgtatcgtggatgatgcccagctcaccgtcgaacgcgcccatgcctcactgaccgcactcagcccccaatccacgctgaaccgaggctatgcggtggtgcagtccgccgatggccatgtgctggatgacgcttcgcgggtcagtaccggggatgacatcaccgtcaccctgaaaaagggcgtcattaccgccaccgccacatccgcaaccgcaaccgcgtaatgcaccatatgcattcacgcatatataccgtatatataaggagaacaagatgaccgagaacaccacacccaccgacaagaacacccccgcctcgtccctgacggacaaggaacgcgagctcatcgcccagatgccatatgaggaggcgcgcgacaagctgattcaggctgtccaggcactggaaaccggcggcctcaatcttgaccagtcgatgcgtcaatgggaaatcggcgaggccttggccaagcgcgcccagggcctgctcaacgacgtccgtgccaagctcgaccaagcacaagccgagcaagccgccaacgaagccaccgcaggcacgcagtccaacctcgactgagttgcctcccggcgcggcatcccgcggctcgcacctgagtccggactggactgagttctgcttcccggcatacgatagtggtgattaggccacattggcagcagtttatagaagggaaatcccatgtcaacgttgattcttgtattccatccgcatcttaaggacggctcgcgcgtgaacgcccgcctgctcgccgaactcgccgcacagggcgaggacgacatcatcgtgcgcgacgaatacgccgaatacccgaacttctccgtcaacgccgacacagagcacgagctgctggaggctgccgaccgcgtaatccttcagttcccgttctactggtactcctcccccgcgctactcaaggaatgggaagacgaggtcatcaccgccggctgggcctacggtggaggccacgcactcaagggcaaggagctcaaactggtggtcaccactggttccgacgccgccaagtaccgcaaggacggcgagtacagccacaccatggaggagctgctaagcccgtttgaggtcgtggcgtacaaggtcggcatgaactatgctgagccgttcctggtgcagggcaccgccaccatcggcgatgcggagctgaatcaggccgccgccgattatgtttcggcgattttggactgaataagctgaggccgggtgcaagtcgcacccggccctgttgttttttcgcgggcaagccgcagggtctctccctcagtcagcttcgctgacagctccctcgtcagagagagcttattttttggatcagagggagttgatagctacttcttcaacggcacgtagatcacgtcgtcaatgagctcgcgatagtgctcaacgatttgcgcgcgacgggtcttcaggctcggggtcagcatgccgttggcctcggtgaattcgtctggcagaatctcgaacttacgaatcgactcggcgcgggaaacgccctcgttggcggcgttcaccgcacgctccacctcagcgtgaacgatggcgttcttggccagcgaggccagatcgggttccggtttggcgccctgggattccagccaattgttggcatccgccagatccagcgtgaccagagcggccacgaacggcttcttatcaccaataaccaagcactggttgaccacaggcgaggtcatcacggaagcctcaagcagacccggcgacacattcttgccaccagcggtgatgatgaggtctttcttacggccggtgatggagatgaagccatcttcggagatatcgcccagatcgccggtgtgcagccagccatcagtgatctgctgggcagtgaccccagggttgttgtggtagcccttgcacaccagcggtcctttgaccaccagctcgccgtcctcggcgatgcccgcagtgataccgcacatcggcatgccgatggtgccgatgcggttgtcctctggcaagctcacacacaccgggccgcaggtttcggtcatgccgtagccttccagcaccggcatgccgatgccgttgaagaagtgggaaagctcggagtccatcggagcgccgccggtgatggcgaagtcggcgttcggaccgaaaatcgtgcgaatcttcttgtacaccacctgctcgtagaaggcgtgggcgatgcgtccggtaatcggcagctgctcacccttctgctcggccttggaccattcgcgcgcgttctcggcggcgcgcatgaacatcttgccagcgaatccggtgccggcgcgctgggaggcggcattgtagaccttctcgtacacacgcggcacggcaagcagcagcgtggggccgaaggtctcgaagtccttgaccatcgtcttcatattggagctcaaggccagcgaaatcgtgccgccaaaactgaagaattccaggaatcgggcgaacacatggctcaggggcaggaacagcagcagacggcggttgggccatgcgccggcacgaggcatgtactgcagcgcggaaagcaccaggaaggcgaagttgcggtgggtcagttccacgcccttcggggtgcctgtagagccggatgtgtagacgatggtggcgcggtcgtcgccgtgggaggcttccttgtattcccagaattcggcgtcggtgacgctttcgccgtaggtcttgatggcgttcagaccgccggcctcgattacgaacacgttgcgcagggtgggcacctcatcgcgcacgaattcgatcttgtcacgctgcccgtcatcttcggcgatggcgagcgtgactttggaatcgttgaaaatccagctgacctggctggcggagttggtctcgtacaccggcacggtgagcgcgccgatggacatgatcgccatatccagcgcggtccattcccagcgggtgcgcgagacgatggcgactgaatcgcccttgttgacaccaagtccgaccaggcccttggccaagtcgatgaccatgtcacggaatacttgggcgctgtacgggtgccaagtgccatcatcgcccttgtattcgatcatggcaccttcgggatcgcgcttggcgcggttatcgagcagatcgaacaggttgatgtcgctgtcaatcggctccttgacgggattggtgaactgcttgacgatacgagtatcgtttatggccttatcagcgatgttttcagtcatactccccatgtaactccacggatgctacaaaacacgcgcgaaacaacggattgtccagaccaaatggccccggcaatccgttatttcgggcaaaccaggtaaatctgtcgcaccgtacattcagcagattactcggcggagttattggcctttttcagctcgtcgcgaatctcctgcagcgtggcgagagtctgctcttcaacgctaggcccctgttcttcagcgtcagcctcatcctgggcagcagtgagatcacgaagcttattaatcggcaaaatcacgcagaaatacaccgccacgccaacaagcaggaagttaatcagcgcgttaagaatcgcaccaaatgaaacagtcgagttgttgaacgtgatggtcagcagtccggaaagatccggtacgccgccaatcatgccgattaatggactgatgagattgtcgacgatggaattgaccacagcggtaacggcagagcccatcaccacacctaccgccatatcaatcatcgatccgcgcgacaggaatttcttaaagccattcaacggacctttatcggtcaaagcaacaactttgcgagcggttcctcccgtggccttggcaaagtcggtggcaatattcatgggattgtggctattcataacggcactccttacaaaattcggacacttcacttgtatccgactggtttcccacgactccattatgccgcttgttggaatacccctataccactgcggcgttcccgtacatgactatgtacgagaacgccgccaaccctgcttgcagagaacctgttagagctgtttagaactgaatgtaatcgacttccgtatgttcgccggtttccaagtatttcgccacatcatcaggaccggcgaaaaccagttcgaccgcttgcgcaatcatcagattgacacgatccattggtgtaaggttctcgaaatagccgtacaccggaattcccagcgcatgtgcatatccgatttcgaacatcgtgcctgggtcctcgtccataagattggcgaccacggctttagcagcattaacgccacggatatcgtccgcaaagcatccttcagggcctgcttcttcgatctggctgacaaaccgcggcttgaacagtaccttgccatggtcttccagtatcttttccaaacgttccatacttgccgtttgttcaggatcgaagaacggaccggccacatagaagtcatactgcttgtcttcactcatggtctctagtcatagcgcagcaacgtcgaacgtcagccgttattttcactgtatggacaagtggtcgtattgtgaacattgctacgggataaccgccaacgactacgtacgttgcccacgattggcgcatgccgccgctcttgcgccgcccgcactgccagcccgtcagccgcgattgacgatttgcatggcgcggccatcgtccatcaggtggaagccatgcttctggtagaacggtgcgtttttgctttcctcaggcatgacttccagcaagaagtagtcgcgatacttagccttgaccagttcaacgagatggctgccgatatgctgcccgtgatatgccggatctaccagcacccaatgcatataggccaccatttcggtatcgtcgagcacacgaaccaagccgaccaaatggccgccatcccatgcgctgattaccgtatccgaatgctgcaatgccttgaacaaccgttcgggccactgcgccgattcccaaccaactgacttgaacaccgcctcaacctgttcgacggtaaaccgcttctcttccgtgtattcgatagccatgggccctcacgacaaccgtgaagccccacatgtctttgcatagtttcacacgacgggatgatggatagtggaacctatacgtttacacatgcctaatgcccatggctcatcaccgatgaatagaggctgagataccgtcatgtttccgaagccaagtgcccgagatcggattcgaaccgacgacacccgctttaggagagcggtgctctatccactgagctactcgggcaacgacgtttcattgtacacggccacacgcccagtcgcatcatgttcgcgtggcagcttgcgcaagccatccggcaacctgagcaagccacatggaggaacccgacatcaggtcatggcccggtctttcgtgccagtttggtgcgaactgctcttgcgcacggcgaaaagacactgaaagacaagccgtacacggtacagtggcaaatcgcacgaaaagcaaagtaacagtaaacaagccggaggaaagggcagcatggcaaaggcacggagtactaccacaggcgcaagcgtacgagctcgcgccgctgccaagccacgctctgccagagccacggcacgcccagtatccaagtctgccgtgaagccacacaaacggcatcgtctgcttggttttctcgccacgatgttcgcgcttcttgcccttgccggcgctgccgcccgcgcgctgcctgccgatttacaggaactgccatttgcgccgattgtggtatcggcaacgccatggttcacgttgcttggcttgattgccctgctgttggccatcgtgtcgcggcgtatccttgccgcactaatcgccatcgccgcaatcgcatgcaatggctattggcaatatccgttcttctactcgaccgatccactcccccaagccgcgcagaacgccgtggccgcagcctcccccaacaccagcgatgcctacgcgcgcgtcatgaccttcaatgtgtataaggggcaggccgacccgcaagccatcgtcgagctggttcgcgatcagcgcgtcgaagtgcttgctttgcaggagaccaccgaggatttcgtcaaaaaactcaatgaggctggtattgagcattatctgccgtatgcgcaggtctcatcgtctgacggcgtattcggtaacggcctctggtcggccacgccacttgccgatccgaccgacgatgacgtgaattccagcgcctcattcatgcccggcggcacggtggatatgggtggccagcagattcgattcgtatccgtgcacaccaccgctcccgtacccggctactggcggcagtggaagcgatcgctggatgagttgggtctgatgcgcgagcatacggatacacggtatattttcatgggcgatttcaacgccacttacgatcacacgccattccgtgattttcttggcgaccggttcgtggatgccgcacgtgaatccggacatgggtttacgttctcatggcccacgaaccgtgcggctgtgccaatgttcgccggtattgaccacgtggtgcttgatcagggcatgaaggccggacaatgcaaggtggtcaaagtcgagggctctgatcatgcggcattgttggctaccgtggcggttgggtgattcccctcaataggactagaaaccgaggcgggtgcggccgaattggtcgagccagcgcaaaatcgcgccttcacgcagcgcccacgggcagatctcgacttcctgaatattcagggccttcatgatctcgtcggccaccacgccgccgcccacaatctgcatcgtgcgttcaggcgtgatgccgggcaaagccacgcgctgctcaggcgcgatcgccgccaaacgaggaatccagtcttccaactgctcacgagtcataatccatgaatcttcgcggcccggcgcacgcatcaccgcaccgcacaggcgagccagcgagcggaaggtcttggaggtgccaactgcatgattcgggtgcttggattgcgggaaaaccttgaccatcggctccagaatcttgcgcacgttcttacgcacgtcttccaactcgtcgggcgtggccatgccggaaggcagaaattcagtggtgacgcggcccgcgccagccggggcggaaagcgctacggtcggctcttcgtcggagcccatcgccacttcgagcgaaccgccgccgatgtccagcaccagcagtcggccggcatcccaaccataccaacggcgggcggccaggaaggtcaggcgagcctcatccgtgccagacagcacagtgacgccctgaccaatcagttcctcgatcttgtgaatcactttgttgccgttcggcgcctcgcgcagggcggaggtggccataaccagcagctgggtgatttcgtattcctcggccagccgcatgcactgggacacggcttccagaatcgcctcgatgccggacttcttgattgagccgtcgtcctttaaatacttcatcaggcgcactgtggatttggtgctggcctcggggtcagggcgagcgccgggggcggcgtcgacgataagcatgtggatagtgttcgaaccgatatcaagcacaccaagtcgcgtggtatgcgaacgcagattgaccatgattcctattcctgaccttacctaacccgtgatggccgaacaacgggccgaccatcgcaatcagccagccgtgcgccaccatggcgagtcgttcggccggcaaccaacaccgtgaggccagccgaacatcacacaaactcgactactgtacaacaatcacaccggctgccgcgccgttcacagcgattcgacgaacgttccgagacgttccagcccctcggtcagggcctcacgtgaggcggcatagctcaggcgcacatgcgtatccgccgtggccgcgccgaagtcgcggccaggagtcagagccacatgggcttcatccagcgcgcgttcgcagaacgtccaggcatccagaccagtgcgggagatgtcgaagtaggcgtagaacgcgccattcggctccacctcaaccggcaaaccgatgcgcttgagcccgtcaatcacaatgcggcgacgggccagcaattcctgacgacgagcttcgcattccgccaagctttccggcgtgaagcaggcgagcgccgcatgttgcgtgggcgtgtgggcgcacaggtagtagttggtggccagatcgtcaaccgcttccagcacagtgggctcgtccggcagaatcgcccagccgaggcgccagccggtcatgccgaagaacttggagaagctgttgcatacgatggcatcggggtcgcaggccagcacggatttgacttcggtaccgtccggctcccggtcagccaagtcgaggtaggtttcgtccacgatgcgccatgcgccgcggctggcggccaacttgcacacctcgtccaatacgttgaagtcgatggtggtgccggtggggttggacggcgacgtgatcattacggccttggtcttgctcgtccagtactggctgcacaggtcggcggtcaggtggaagcgggtggcggccgaggtcggcacatcgatgacccggccttcaaacgaccgcacaagttcgcggttgcatgggtaggaggggtcggccacaatcacatcgtcaccggggtccacggtcagcgcggtggccaacagcagggcggccgaaccgccggcggtcacgcagatacgcttggggtcgatgtcaaggtcatgacgctcgcggtagaagtcggcgatggcctgacgcagttcaggtaggcccatggcggcggtgtacggcagggcccggccgtcgtactgttcgcgcatggcgtcgcgtacggcgggcggcgcgccgaaatcgggctcgccaaggcttaatttgatgacgctggtaccttgggcgatcatcttgtctgcttgttcgccgaataccatggcacggaagggattggcctcacgcgctcggcgggacatgactggagacgcggccggagattggggctgctgcgctgcttcgttttccatatttcggttctatccgcctcacgggacaaggtttcttcttctataatcactgtaggtcgattgagtgtaccaacccgcattcaaggaggaataatgagtcgattcaatggcaagcgcgccgagttcgaggccagcggcgaaaaaatcaacgtcgcgattctgggtgcgggccgcatagctcacaccatggccggcaccctgacccagatggctgaagattcactgtattcctcatggattcacccgtatgcggtagcggcccgtgatattacgcgcgcgcaggcttttgccgaccaatggcattttgacaaggcttatggatcgtatgaggagttggtggcggacccggatgtggatctggtgtatatcgccaccccgcacagtctgcacgccgaacaggcgatcctgtgtatgaaagccggcaagaacgtgctggtggagaagtcgttcaccgcgaacgccgggcaggcacgtgaggcgctggccgtggccgaggaaaccggcatgctgtgcacggaggccatctggacgcgctacatgcccagccgcaagctcatcaacgaagttatcgagtccggcgagatcggcgaggtgaaagcggcgagcgccaacctgtgctatccggtgtccggcaaggcacgtatgaccgatccggcctgtgccggtggcgcgctgctcgatgtgggcgtgtatccgctgaacttcctggatatggcgatcggtgccgaccatggccgcacgctggatcatttcgatacgtcgatggtgcccgccgaaaccggtgtggatgcgcagaattccaccacgttgtattacagcgacagcacgatggccgtgtccaccagttcgatgctggtttcctccgaccgcggcggctatgtgtggggcaccgagggttatctggtggtcaccaatatcaacaatcccgagtccatcgacatctatgacaacgcccacaagcccgtgcgcagcattgcggtgccgccgcagttgaccggttatgagtatgaggtggccgatgcggccaacgcgctgctggacggcaagatcgaatgcgaggcgatgccgcacgccgacaccatccgcatcatggagctgatggatgcgattcgtgaccgttggggcctgaagttcccgtttgaggtctgatttcagctcccctccagaggggagctgaaattattccgctgaatctgcatctccttcaacaatctgctcatacagccgtgcgaggcgttcgtcgcgcacggctttcgttaattcgcactcccatacggtaattacacgccagccagcggcctccagttcggctcgctgcgcgatgtctcgattgtgattgcgtagtagtttcgcctgccagaattccacgttcgatttcggcatcgaatgtttggaacatccttcatgcatgtgccagaaacagccgttgacaaacacgatggcgtggtatttcggcagtactacatccgggtgtccggggtaacgcttgtcgttcttgcggaatcgcaaccccttgcgaaacaggtagctgcgtaccagtacctcaattttggtgtctttgccacgaatatgcgacatcgtgtacgaacgggtaccccgctcatacttctccactagctgtttcttgcgattcacgcactccagactaccgtgacgttgcggcgagaatgagaccctgaacgaacgatcacccatcttgcccgtccgtgtctcttatcgcgggcaatgatcatctgccggtcgagactgcccgattagactgagttcaatggatgacatgacgattcgtagggccacggcggccgatattccccagatcgacgaactgctgcggcaggtgctcgaagtgcatcatgccggccgaccggatctgttcaaaggcggtgtcaagaaatacacggacgaggaattgaaggcgattctgaccaacgatcagacccctgtgttcgtggcggttgcgccatctgccaatgacggcactgacgccgaacataacgccgactcccccgccaccgaccaagtgcttggctacgcattctgcgtgttccagcagcacctcaacagcaatatcctgaccgatatcaaaaccctgtacatcgatgatctatgcgttgacgagcggtcccgcggccaccatgtaggctccaccttgtatcgctacgtgctcgacttcgcccgtcaatccggctgccacaacgtaacgctcaacgtctgggcctgcaaccccaaagcccaagccttctacgaacgcatgggactcactccatatcacatcggcatggagcaggtgctgtagcgccgccgtttcagcagcacgatgatggcgatgatcgcagcgaggctgcatagggccacgccatatacaaagcccggagttccgaaattcatgaggcagattgtgatgttaccggtagtggttaccgaaaacacgacgataagcgcgacgatacgaatcatatccagcagtccagctgcttgagccaacagacgctccggtaccaccaatttggccgccgtgcacagcaaagtcgcctgaacggcgagcagaatcgcccattcccagaacatggacggttctttaagcaacgtggtctccggaaacatagacaccacctcattgataaaccacggtgccacaacaatctccacatatgcgagcccaatacaacacacgacaagcaccacggcaatggcatagcgccaagcgacgtctgttttgcgagatttacgagaaatgaatgcgataccagcgttcatggctatgctccttaatccaatatcaatatcaatggatgaacctgcactgcaccgtatgccaccatcataatatatcgaatatcgatataaaaatatcgaaaaacactttcaccattcacctacacatccgcaaacccatgaatacacatgttcttaatcgggatggggagtgcacaaagaagctctgtcaccccagcagattgaggagatcgtccttggtgagggtggcgatggaggcgggggcttcggtgagggcgctggcgccggtgccggcttcgtcggcaagcaaggaagcgtcggtgaactggcgggcgagctcgctcttagtatgctgaagctccaagatacgttcttcgatggtgtccttggccaccacctgatacacgttgacgtcttcggtctggccgatacgatgtgctcggtcggtggcctgatcctgtgcggcggcgttccaccatgggtcggcgtggatgaccacgctggcaccggtcaggttcagtccggtgttgccggccttcagggaaatcaggaaggcaggcgtatcgtccgcattgaactggtcgacgagttcgagacgcttcttcttgggcgtggagccggtgatggtgtagcagcgcaggccttgcgcgtcgaaacgttcggcgatcagatcaaggaagctggtgaactgggagaagatcagcgccttcttgccttcgttcacacaggtttccaccagttcggtgatggcggcaagcttggccgattgatccttggcatcggcgtacagcagcctcggatcgcagcagatctggcgcaacttggtcaactcggcgaggatgcgaatcttcgacgtgttgaaatcggcttcttcgctgtgttcgagctgcattctgagccgctgctcgtgagccgcatacagtttgcgctgttcgccggcaagccgcacggtcagcgtggtctctagcttgtccggcaaatcggtcaacacctgggacttcagcctgcgcttgatgaacacgcccaccaacgactgcaattggcgagatacccgagcggcctcaggattgacttgtgcggcggcccgaccttcagccgtgctgccatccgcggcccgggcattggagatgggcaactcataacgctcatggaatcgcttatatgagccgagcagccccggcatcaggaagtcgaaaatgctccatagttcggagagtcggttttcgatcggcgtgccagtcaaggcgaaacgatggtcggcggccacggccttgaccgctttggctattttcgtggtgtgattcttgatgtactgggcttcatccaatgccatgacattgaaacgttgctcattggcggtgtaatcatcgacatctcggcgcagcaggtcgtatgaggtgatgagcacggtgggttcatccgcccggaacgcacggccgatggcggtacggcgctcggctttggtaccggccaccaccacggcattgaagctcggggcgaacttggtgaattcggcaccccagttgtacaccaaggacgccgggcacacgatcagcgatgggccaaggctgccattgcccatctcgccggtattccgctgatatcgagacaggagcaacgcgataagctgcacggatttacccaagcccatctcatcggccagaatgccgccaaaacccttgtcgcacaacgtgttcagccattgaaagccttcgacctgataagggcgcagaatatgcttgagactatccggcacttcatacgacttagggtcgatgatcttgagatcgtcgatgtattcggtgaacgaagcgtccttgactacatcggagccgtcatccggcagctcaccatccagtaggaatgctcgaccgcccggcaactcgatcagtccggagttgagctgctgctcgctcagatcgaggtcgctggccaatcggtccaacgtgctgagattcgcgccgctgagtttgacaagcgtgccgtccttcaactgatggaatcgttgacgccgacggtacgaagatagcaaggcacccacttcgtccggcggcacttcatcagcgaggggtgatatctccaccaagttgcctttgatggacaatccgactttgacgcttggtggcttgggcgcgatcagccggtcaaaagccggtgtggtgaagacctcccccacttcctttagtgccggcaatccctcgtcaaagagacgaacgatctgcgtggtgtcatcgcgatcgatagtggccgcatcagacacgaattttttggtggcctttcgcgcggccggcgttcggaacccattcaccgtctgatgagtggcggccgcaacgcgcttgcgctggtcaggcatggtaaagaattcacgcactacatcaatcgcaagatgctcagcgtcgaaatcacgcccaatcacgccccgagacaaggggatggaacgctcgccctcagcatgcaccgtcgggccatcgggtagcaacgggacaatggcatcgccgtagcgtgccttgacctcgcattgcacaccatgctcatcacgatccagataaaactggaggctgcattccgtaggacttaattcagccagctcgcgaggaatctcactggcctccaacagtccggcaccaaccagctgaggcaatagcgtgcgtgcgaatagggcgatgtcatcgccggcaatgacctgtccctcgccatcgggttcaaacaggtctcccaatagtcctcgcaacggaatcaatcgtttcgggcaacggacgaatcggcatcctgctgcgcttttacgctgagagcccgccaccatggcggataccgcaccggccggattagtggaggcgagcaacagccatacattcttgccgccgtcaatcacggtttccaccgctggcactccggtaagcaggtatccggcatccggaccatacgtattgaaatcacgccgcgcaatgcgcatgagaaaatctggctcgccaccatcaactggcaccgatgcaggctgcccggagaaccatgtgttcagcacgagctgtgcgcctctgccctcacgtacggacagcaaccgggccacttccggtgctgaaagcgtcagatgacggtcgatggcgatatgcccgtaatacctgtcctgctgctcggccgcacgacgcacggccatcgcatcatcaaggacgtccagcagggggcgcgaatcatcatcgagcatatccggcgtatgaataaaggcaagcttctgcccataatccgcatagtcgccgttcgccatggcaagcacaaattgcggaatcgatttcagcacatagctggacccattggaagccgagccgatcttgaactccacgctccacacgccgtcgatgaaactcaatatcgggacaagctgcacctgccccaagcccacagtctcgctgtcaccctgatacccgccgcctcgggtgccggcacgagagccgtatccgctttttgtacgccgagcatttgcaccgtttttcccttgcgtggcatcaaaccgacgcataaccgcattgcgacgacgaattttggcttgagcgtcttgcctatcagcgtgctccatatagtcaatcagcgtccgagacggtcgtgcggccccggcacggtagccttcaaaacgctgcggatcatcgcagaatatgaaggcgagcgcaatcatgtgcttgcacatgccatagccacggccgtaagccgggcatgagcacttgccaccgacggcttctcccgtatcgaggtcgaattgcacgctggtacgatacctactcgatgggctggtggtgccacgtagaataccgtcaagctcggcatacccggttcgatgattttcgctgtataccggattgataaccatggtggccgctttgcgcgcaatgctacgggcacgagcgagcacggcattcgacgatgacgattccacatcgttgcgtaacgcaaggatagggacggcatgggcttcggcacgcttcgcagacccggcgaaatggccttcgtcctcatcgtcgaaccatacggaacgtccttgcctgaaacgatagggcatcaccgcatcggcggcggacaaactgtccgttccaccaaacgttacgtctctgctgccggccgcgcctgagctaccaagtattccacccgtctcaccagaaatgccgcctactccgccgcttttaccggcatagatgcccctgcccccattagtgtcatcagtgtcatctatgtcataccgaccgtcgtcgtaatcggcatcttcgtcgtctcctcttttccaaggattgcgacgacgcaacgcatggccccaggaaacgccggaatcatcatcctcataaggcaggaggccatcgtcatccgcattatcgggaacatggccaaacacaccataccctttgctcatgggcgagcctcctttccagcgaatgtatttcaacccaacgtttccatcctagacgaagcgcgcggtagccttaatgtatggatgcagacaagccggcgcaacgcaaatcctatgcagggaacaccaccctcgaaatcttcgaggtgctgtggcgtcacagttactttgggcatggcctgaccgtgcggcaaatactcgatgagcttgcccgtaaacaccagctggaagatccaagcgagctgccgaccgagaagaccatacgaaaccagctcaaaaagctgacctccacggaatttctcggcagacatatcgggcatctcaccgaaagcgaccttgccggcatcgaatgcaagaatccacaacccggctggtatcttgatgcattcctgtccactgccgaaatgcgactgctactagacagtcttaccctatctcgcatcagcctcgacaccatggacgacctcatcggtaaaatccgcgagctcgcaggcgccgccgggcaggcagtaggctacctggaccatgtggccacctacacgcatatcaacggtgagttcctatccactatcgaccagctgaatcaagccatcgaagaaggccacggcgtaaccttccaataccgtgattacggaccggatggcaccttgataccgcataaaagccgtacgggtgcaggccgaattacctacaccgccgacccttaccagatggtgtacaagaacggacgctattacctcatctgccacctgcatggcgaagacaacctccgcattttcgtggtcaaccgaatcgccaacgtcagcgccaaaggcaggaacggcacagtgccactggaaaaaccagcaccagctgattttgacgcagtgaacttcatgcgccaccgtccataccccgtagccgatgccccgattcgcatccgcatggccgtacgagacgaatccatgctcaacaacgtgttcgaatggttcgacgaccctcaaatcaaacattcaccggacggcacacagttcgaagtcatcgtcgatgctcccgaacgcgctgtgttctggtgggcattgcagtattcctgggatggccgcgtagtgattcttgagcccgattcgctcaagcgcaaactctatgatgccgggcgtcgcatggccacagcctatgctcccgaatgatgcaacatcacatcgcacacctccttgtcgagttgttcaccagcgaatttcgccggagaacctatcatcccatcgccaatcacactcggtaattttttaccgggaaatacgatttcaagccatttcgcgggcatcgtccctcacctaggcgcacataaggctaaggtgggaatcattaatcgcatcgcgcgtccacaagcgtgcactagcgcgtacaacaataaggagcaactatgagcgaagagcgtaccgcatggggctggggtctggccagcgtagacgccgccggcaccaccctggacgtctggtaccccgaactgaatctcggtgaggcaccggccgagtccgatcgcccgaaccacaatttcggtactttggctcacgatgaggccgacgcccgtggcattcgccgcgtgccggtattcgtcgtcagccagttggacgagccgatcagtaatgccgcggacgcttacctgaagctccatttgatgagcatgcgcatggccaagccgaacacgctgaacctcgacggcatcttcgcccagctcgccaatgtggtgtggaccaactacggccccttcgccgttgaagacttcacgctgcgcaaggccgacgtcgaacgcgcctccaccgaagccgctctcgctttcgcctcccaggccggactgcctgccgcagctcctgccgccactgtcaacgtgttcggtgtggataagttcccgcgcatgatcgattacgtagtgcccaccggcgtgcgcctcggcgacgccgaccgcgtgcgcctcggcgcttacttgtcttccggcaccaccgtgatgcacgccggattcgtgaacttcaatgccggcacgctcggcgtctccatggtcgaaggccgtgtttcgcaaggcgtggtcgtgggtgacggttccgacatcggcggcggtgcctccatcatgggcaccttgtccggtggcggcaagctgcgcaattccatcggcgagcactcgctgctcggcgccaacgccggtatcggcatctctctgggcgataactgcaccgtcgaagccggtctgtacatcaccgccggcactaagatcaccatctgggacaaggccaaggccgccgctggcgaaccgctggaagtggtcaagggtgctgagctctccggcaaagacaacattctgtttatccgcaactcggtgaacggccgcatcgaagcccgctaccgcaaggtgggaattgagctcaacgccaagctgcacaagaactgaaattgaaataatggagcgttatcttcgttgcccctcggtcgacgtaccttcgtacgccttccctcggtgcgcctcgataccgcacacattatttcaatttcagaactagccctgctagttcttatgcagccgtcgcagcatagctggtttgcgctgtacatatagaaagcgcctcactggaatctccagcgaagcgctttctcaaaccaacaatcaccgctcgtccatcggcacgaaatcgcgctcgaccggaccggtgtagacctggcgtgggcggccgatcttggtattcgggtcggccaacatctcacggtactgcgcaatccaaccgggaatgcggcccagcgcgaacagcgtggtgaacatggccggatcgaagccgatcgcccgataaatcaagcccgtgtagaagtcgacgttcggatacaggttgcgcgatacgaaatattcgtcattcagcgcaatatcttcaagctcggtggccacggcgaacagcgcgcgctcgtcagacggcagcttctgcgtatcttcgcgctccatgatcttttccagatacttcctggcaatcgccgcgcgcggatcatacgacttgtatacacggtggccaaggccggaaatcttctggccattctccttggcatcacgcacgaactcggccacagacttgccggaatcacgaatcgccttcaattggcgcagtacggcctcattcgcaccaccatgcaacggaccggacagcgcattgacgccagcggccaccgccgaatacaggttggcgtgggcggaaccggcgatacgcaccaccgaggtcgagcagttctgctcatggtcggcatgaataatcaacaaacgacccaaagcatgcacatacagcgggtcggattcaaacggctcgtacggcacagcgaagcacatgcgcaggaagtcgtccacatagccgcgcgcgtaatcggggtacagcatcggctcatcgcgacgacggcggaagatgtacgacacaatcgtacgggccttggccatgatgatcttggcggcctcatcaagctggtcgttgtcagaaatatcggtggtgtccgggtagaacgtggccagcgcattgatggcggaggcaagcacgctcatcgggtgagcggagcgcgggaacgaacccatgaaggtacggaagtcttcgccaaccatcgtcttgtgattgatgtccgcacagaactgctcatactcagccctgctcggcagctcgccgtggcgcagcagccacgccacctccagaaaatcggagttctcgcacagttgctcgatggggtaaccgcagtagcgcaaaatcgaatgcttgccgtcgatgtaggtgattttcgattcgcactgcgcggtggtgaggaatccgggatcaagcgttacccagccatcgttgcgcagtttggaaacgacgatgccatccggccctgcactagccttaaccacgggcaggttgaacttgttcgaatcgacatcaagttgtgccgttgccattcgcgcaccttcctcttcatgaaccacttaccccaaacattaacgttcacgcgttcgcgaacactagtgttcggtactctatgtcttctgtgttaccgctggcgaatgccggtcgatacacgaaagccgaagtgcgctcatgctatcaaagcaaacgcacttcggcttgttacgtctcgaattcgcgggaaaaccgcgaacagacggacggctaatgagacgctgatcgcccatcacaggccaatcaggcacctaccatacgccaaacgccgatcagaggttggtgcgatcggtgaagacgatcgggccgttctcggtgatggcgatggtgtgctcggagtgggcgccgcgcgagccgtcggaggcacgcagggtccagccgtccttcggatcctggaagatctcgtcggtggtcttgaggaaccacggttcgatggcgatgaccaggccttcgcgcagcttgtagccgtggtgggcgcggccgtcgttcggcacgtgcgggtcgccgtgcatgatgtggcccacgccgtgaccgccgaactcgaggttgatcgggtagccgtattcgcgcgcgacgtcgccgatggtgttggagatgtcgccgagacggttgccgggcttggccacgtcgatggcggcggcgagcgcttcctcagtgcacttgatgatgcgcaggtcttcggggtccgggtctttgccgaccacgaagctgacggcggaatcggccacccagccgtccacagagatggcgagatcgagggagacgaggtcgccgtccttcaggctgtagtcgtacggcacgccgtgcagcacggcgtcgttgacggaggtgcagatgtagtgggcgaacgggccggtgccgaagtcaggagcgtagtcaacatagcaggattcggcgcccttgcggtccacgatcttcttgtggacgaactcgtcgatttcgagcaggttggtaccaactttggtggtctcctgcagttccttcagaatgccgccgacaaaacgaccagccggcttcatttcctcgatttcacgaggggttttcagttcgatcatgagattctttctaccttgttgagacttgttctcaactctagaccagcccgaggtcaaccgccagaagcctacctgaaatccactcgcagcccattaatagccaaggccgagaaaaagcgcccggcagcacatagcctgcacgggcgctttggattgattgtctggggactggttgcatgaagcgtgagattacttgcgacgcttgccgaaagtgaacgcgcgaatcactgaagtaatccccatcaccaccatggcgcatccgccgaagataatcatgaatacggcggagctcagcgggctcatcagcaccacgaagccggcgataatcgagatgatggcataggcgatggcccagccggaatgcgggatacgccacgattcaaccagcgacagcacgccttccataatccatccgaaaccgaccatcaaagtaatgagtaatgccagcgtctgaccggtcatgccgtagttgcgcacaaccaccacgccgccaaaggtcagcagaatgccgacgaacacgtccagcacacgccagccgcccggcagacccggctccacgagagcgctgacgatgcgcaccacgccggaaatcacgaaatacacgccgagcaacaatgcggccaaagccagcgtcttgttcggcaccagcaacagcgcagcgcccaaggcgatggcggccacgcccaccacgccgtaaatgatgcgaatcttggtcttggctttttccggcagccattcctcgatcaggcggaatggactgaaattgccgacataccagttggtctgctgccagccgggttgactttgatcgccccatggaccattcggctgcccgtccgcttggctattcgattggccgtccgcctgataccgccgaccgtccggcccccatgccggctggccgttcgggccatagttcggattgtaggcgtacgggccgtagtacgggttctggttcggttcgccttgtggctggccgttctgcgcatgctgattctgagtgtcttgcgctcccggcgcaccttgcggaggatattggccgccatgattgctgtcatacgcaccatactgcggttggcccggttgacccgccggattcggctggttcggctggctctggttgggctggcccgtctggccattccactggtcctcgttcggattgctcatcgtaactccttagctcaaggtccatgttcagattccacatactatgatagacaagttgtctaatttgaaccatcaccacaattaggcaatctgtctagttcactgacagcgcaatgcccataacgcaatatctgcaccatcaacgcttctcccccgccgcgattaggcttagggccatgaccaacgaaaccgaaacgctgacgtcgggcatcgacccggcatcgttctcctccgtcatcaagccgaccaacgacctgttccgctacgtgaatggcccatggatcgacacctaccgattgcccgacgatcgttcgcgctacggctccttcgacaagcttgccgaagacgccgaaaaccaagtacgcgacatcctcgacgccgacgactgcccggctgtcaagtctgaggccctgtaccgctcattcctcaacaccgacgccatagaggccgccgggcttgacccaatccgcgacgagcttgacctcatcgattccgccatcgacaaggccgcactcacgcgcgtgctcggcacgatcaacccagccggcggccccgatctgttcggcttggccgtttacggcgacccgggcgacccggaccgcaacatcgcccaccttgagcaggccggcctttgcctgccggacgaagcctactatcgcgaggatcactacgctcccgtgcgcgaagcatacgtggcgatggtcgccacccagctggtgaacgccggatacgcgcccgccgccgagtccaacggtggcgatgagctgccgtccaacaccggcgatgacgagagcaacgctcccgccacagttcccagcgaagccgcgctcggcatggcccgccacttccttgccgtggaaaccaagatcgccgccaaccattgggacaatgtggccacgcgcgactcggtgaagacctacaaccccaccgattacgccgatctggccgccacgctgaaaaacttcgatctcggttcttggatcgacgcttggcagaccgcttatgacgccaccgaagccgccaaggctcagccgattgatttcaagtctgtgttcgcgcgcgtcattgtgcacgagccgagcttcctcactggtcttgatgcgttctgggccgaggccgatctggccgaccttaagctgtgggcccgtgttcacatgattctgggcttcgcctcctccctgtctcgcgacttcgacaccaccaactttgacttctacggcaaggtgctctccggtgccaagaagcagcgcgatcgttggaagcgcgcggtgagcctggtcaacggcatttgtggtgaagatgtgggccgcgaatacgtgcgcctgcacttccccgaaagctcgaagcgccgcatggaagagctggtcgccaatctgattgacgcctaccgcgtgtccatcaccaattccgattggctgggcgaggacaccaaggccaaggctctggagaagatctccaagttcacgccgaagatcggctacaccaaccactggcgcgattattcggcgctgagtgtttccgcggatgcgctgcccgccgagaacgccaaggccgcgaacctgtacgagaccggctatcagctggccaaggtcggcaagtcggtcgacaaggacgaatggctgatgaatccgcagacggtgaacgcctactacgagccgagcatgaacgtcatcgtgttcccggccgcgattctgcagcccccgttcttcgacccgaaggccgaggatgcggcgaattatggcggcatcggcgcagtgatcggccacgagatcggccatggcttcgacgatcagggttcgcagtacgacggcgacggcaagctcaacaactggtggaccgacgaggatcgcaagaacttcgaggcccgtaccggcgcattgatcgcccagtacaacagctttgtgccgctgcagctggccgagaagtacgctgacgagcctgataaggcaccgcacgtgaacggcgcgctgaccatcggcgagaatatcggcgatttgggcggcgtgaacatcgcgctcaaggcgtatgcattcgcgctcggcaaggcggcaggtaagtccgacgccaaagaagacggctcccccgccgccatcaaggcactgctcgataccgcccccgaaatggacggattcaccggcctgcagcgcttcttcctgagctacgcctccatctggcgcaccaagaaccgcgacgagctggccgaacagtacctgcagatcgacccgcattctccggccgaattccgcaccaacggcatcgccagcaacgtggacctcttctacgatgcctttggcgtgaccgaaggcgacgccatgtggctcgcgcccaaggaccgtgtgcgtatttggtaatccccgttatgtaaaggaaaaccgctgtgtttgcctcgattacaggcgaacacagcggtttttcatgatgtatggttggcactcagaattcggaatcactgggattggaagattcggcgaaaccgtcgacgtaggtttgttgggccacgggctgtggttgattggtgtcggcgtccggttgcgacatgacggcatcggccacggccgcggactcggttgatggcgacggcgattggccggaatcggaggtgaccccaaattcgacggggccagattccgacgaggtcgcatacgggtcaatacccacaccggatgcggcaccgcccgcgccatattgcgttggcctaacgtacggcgacgatgctcgttgcccgtttccgccatccataccttcgacggcaccgttggcattgccgttaccgttgccaccattgcctccgttcccattaccggcacgctgtggcttgatcagcgacgtggtgccgaaggtcaggtcatgcccaatgttggtggcttcgagaacggttctactgcgcggttcgctttgctcattggtccactgctcggtgatgagtgagccgaccacaatgatgcggtcaccgcggcgaaccgaactggcggcgttcacggccaaagcacggaacgctttgacgcccacccatgcggttccgtaatcctcccattgtctggtagtcgggttgagtcgactgcgcgtgctgcccatacggaatgtcagcacgcggaagctctcggttccgcctagtgtcggatcaccggccacaaagccggtgacggtcactgctgcttgttgatttgccatgatcggtcctttcctcggcctgctggcctgttgtttggatgtggaccgccggagcctgtctccggcttcattgccggcttgcacgccccagcggtacctccactgtgaggcatgacgtttgaagcgcacaagggcaactggcaaatgtggatactgtgacgcagttgaaattttaagaatgtggataagtttcggttatccacaacaaagcgccattctgcgactgggcagaatggcgcttgatgcgattaacgccgaggctgagtaagtgggactcagctgagggcggcgaagcgctcggcgagcgcgtcggcggcttcggcggcgggcacggcgaccttgttttcgccgttgcggtcgcgcagttcgatggtgccgtcgttgacgtaatcgcggccgaccacggcgaccagcggcacgccgatcagctcggcatccttgaacttgacgcccggagacaccttcttgcggtcatcgtaaataacctcaaggcccttggcctcaagctcggcgaccagcttctcggcaccttcaaacgccacggcgtccttgccggtggccaccacgtgcacggcggccggggcaatcacggacggccaagccaagccggcttcgtcgtggtgtgtttcggcgatgcaggccagcacgcgggaaacaccgatgccatagcagcccatccacaccggcacggccttgccgttctggtcgagcaccttcaggtccagtgccttggagtacttgagacccagctggaacacctggccgatttccacaccacgctcgaagctcaacggaccggaaccatccgggctcatgtcgccgtggcgaacctcaacggcttccaccacgccgtcgaccttgaagtcacggccgtacaccaggttgtagtagtcgacctcgttctcatcggcaccagtgaaccaagcggaacccttgaccacgtgcgcgtcgatcaggtagcgaaccgggttcttcacgccagcagcctcggcctgcgggccaagcaccatcggtccgatgtaaccgggcaccagttcggggtgctgcttcaggtcttcctcagtggcttcctcaagttcggcgggcgcgaactgggcttccagtcgcttcatatccaccgtacggtcgccgggcacgccgacgacaatcacttcacgccacggctcgtcatgctcttcatcctcagggtgcttgacggtgatcaccacgttcttgaggatgtcggaagcctgccattcacggccatcagtacgcgggtggtcggcgttggcacgctcgatcatgttatcgatggtcttggcatccggggtggcttccttggaagcggcgggagtggtggaagcatcgatttccggtagttccggagtgctcagggcctccacattccatgccttgccggaaggtgccagcgcgaaggtatcttcgccgatcggcatcggagccaggaactcctcggatgcggagccgcccatcgggccggacatggcgaacacaggtacgtacttcaggtcaagacgctggaagatacgctcgtaagcgccgcgctcgtcatagtaggccttgcgcatgccttcttcatcgatggtgaaggagtaggcgtccttcatgacgaattcacgaccacggatcaggccggcgcgcggacggaactcgtcgcggtacttggtctggatctggtacagggtgacgggcaggtccttgtaagaggagtacatgtccttgaccagaagggtgaacatctcctcgtgggtgggggccagcaggtaatcggcctcgtggcgatccttcaaacggaagatgttatcgccgtactcctcccagcgatgggtggcctcgtagggttcgcgcggcagcagggccgggaagtgcacttcctgggcgccgatgccgttgatctcctcgcggatgatggcctcgatcttgttcagcacgcgcagaccgagcggcagccaggtccagataccgggtgcggccttgcggatatagccggcgcgctgcagcagcttggctgaatcgacatcggcatcagcggggtcctcgcgcagggtgcgcaggaacatggttgacatacgaagggtattggaagtcatgtgttccacgatattcgcgtgaaccgacaagcccgcctgctattcgcactattccgaccttcatcttggcattcggactcactcgtgcaacaatgacggctagaagggtagaagggcacgatgacgcaaccgaccgagcaacaggggaatcagccggaatcctcggagcagccggtgtatcaaccggccccagcatgggccccgcaattttctgctgcagcccccgcaatttccaacggcagttccacaacaagcggcatcgcaacagccaatggccatgccaccgtttgcgcaatcgcctatgtcggtcccggaacaagcggcctgcccgtatcaaccgtaacagccgggccgggcctatgcttctccctgcccctacccgaatccggcaatggcccagccgaaccaaccatcagtcgcgcaagagcgattcgggcgttcgtcgggacggctgaccgcatcacaggttattgagacatgcgccaccattcttgccggcgtaatactcctcggtcttgcatggaccaacccgcaaccgtatgccccggtggatcttatcgccggcctgtccggagcggccgcgctgattgtgggtgtgcgtttgccgcaagtacgcccgatgctgcgtagctggccggcattgtggcttgctttgggcggcatcattctgattgtggcagccgcgcgctatgaggcgagcctcaaatcgatgaggacgattgccgcgcgtattggcgatctgcggtgaatcgcgcgggcgacctgaggcagattaccaacgtccggcgatagcagtcctgcatacggggcagtgcccattgccaccgtatccagcagataaacgattggcaatgattcgataccaatcgcgttccacgagcttggcccggcattcagggtttgggcaatacgtggtatcgccttcacgatcatgcacgttgcctgtgtacacataattgagtccctcttcgagggcgatgtctcgggcgcgggtcagagtctcgtgcggggtgggcggtacgtccatcatgcggtaactggggtggaatgcggagaagtgcagcggcacgtccggacccaagtgctcgcgtatccatgtacattcagcatgcagctgggcgtcgtcatcgttgaatccagggatgagtagcgtggtgagctccacccacacgtgttcgccttctggtgtgcgtgcctcgttgaccgcatagtcgatggtctcgagcacatcggccagatgagtgccggtcactttccaatagaactcttcggtgaagcctttgaggtcgatgttggcggcgtccatggccgcgtagaagtcgggccgggcttcggcgctcatgtatccggcagtcacggcgatgggatggatgccgagcgctcggcaggcttcggccgtgtcgatggcatattcggcgaacacgatcggatcgttataggtgaacgccaccgaatcgatgccccggtcggccgcgacctgcgcgattttctccggactggcttccatgccgagccggtcgaagctgcgggctttggcaatatcccagttttggcagaatcggcaaccggaattgcagccagccgtgccgaaactcagcacactggaaccggggtggaagtggttgagcggcttcttttccactgggtccacggcgaagccggagctgcggccgtaggtgtcggagacgatgagtccgtcgtggtttgagcggacgaagcaaaagccgcgttggccgggcttgaggacgcagcggcgcgggcatagttcgcagcgagcgcggttggtaccgtcgtggaattgcgtttgccagcgggctatggcggggttacgaacatctgtgactgacgccgtatgaccgcaccccggtgaccacccgattcccgatgaccaccctccggcgcttcgcgccacctcctgccagcgggaggagatatggttgctgcgttagtgctcggcataggcggtcacctcgtagcgttgacagtcgatttcgctatcggtccagtcgtaggaagggcggataccggctttggcgagcaggtgagcgacgaaatcatgcggatcgggcagctcatcccacacttgtggcaggaatgtggcgctgcggccacgacggtcggcgagaatcagaccgtctttgccggggcgtaatacttcctcaagttcagtgcgcgaacgtaccgggcgttcgacgttgctgccgttccgtttaacggcgtcggtctgaggtccggattgcagcaatgccagagtcgcggtcttcgagccggtaccgcgcgaatcggcgtcacaggagttcacggtaatcggctcgggctcgcccaagacggatacctccacgttgagcaacgggtattccgcggcggtgaccgggttgaaacgtgggtcgcgggtggcggcatccactgcgtgctcggccacgtccttgccgagcgagcggtgggcgaccagcgaaccaatgcacccgcgtagccggccaccctcggtcagggtgacgaaacaggcaccggactcgttcagccacgggtttgcggcaagaatggacgcggtcgaatcagcggcggtcggatgctcgatatgcagccgttcccggatagcggcacgggcaagtttcagcagcacctcaccgtgggatggcgtacccgatgtgcctaagtcatctgcaccggctagagcatctgcttccggcttggattcccacgcggcaaacgagacatatcccactaccggctcgtcggcgtctcgcattgcggggcgaggttggccggcgagcgccaccacgccgtcgtcgccggaagtggaacagccgagctcgaagagcctcatgcccttgcggccttttaacacatccagaaggccgttgatcgggtatgcgccacaggcccggcgagggtgaatcggcagatgcaaagccgcaatgtccgcaatggtctggtcatccaacgcgcgggcgacttcgtgcggatgatagtgagagagatccgaactaatcacgatgacggtttccgggccaccccacaaagcacgcaacacatcacccacctcttgtggcgtggcatcgcccgcgttcaacggcacgatagtgaggtctgggccgagcacggtctgcaggaacggaatctgcacttctaccgcatgttcttgtgcgtgggttgggccattgacgatcattgcgggagccggcgcgcccggacgggcatgtgtaccggagcgcaatggctcattgacagacaggcccagagccttacgctcggctgcaatgtctaccggcacagtgcccagcggcgtttcaaacgccgctgccgtggaacaggcgacgcctcgcacggccacgcggtgagtcggccctacgattaccgcgcgagtcacgctcccccgcccacgctccaagagcgcgtaagcgagcgcagctgccgtgccggaatatatgtatccggcgtgcggcactattaccgccctcggcacccccgctggaagtgtgggctccaactgttgcagaagctttcggccgtaatcgagctgctggttgattagctgtttgagcgcggtgcggtcagccggataaaacgaaccggccaccgctgacggacgtattgcgccagtgattttgccgctgccgtctgccgcgcttgctgcatctgacgcactagccacactgaccgtatcgatttgcacaccggctcgggcggcctcgcgaacctcattgtttccacgaaatatctcagatagcaccataactaccacctcttattccatggtagccgctacggagcgcttctaaagatcagaataacgcgtcctgggcgaagtcatcatcggaattggcaccgaattcgtccggctcaacaggtttgaacgcgcttgcaccttcatcggccaactggtcggaggccgcggccgaggcttcgcgcaggtcgccgtcgagcaccacggcatcgggcgagacgaggaacatgcgttcgttgacgccggccaaatagaggccgcccaacgattcgactcgggacagcgccacatatcccatgcctggcgcgaaagtgcgcttcaggtccatgaccgcacggtcaagcgtcatgccttgcgacttgtggatggtgatgccccacgcgcagcgcaacggcacctgggagacggaggcgagcacggtgtcgccgtccatcatctcccatgtggtctgtttcatggtgacgatgttgccgttctcgaattccacgatcggccagccgcccttgttctcctgtgcgaagccacgcacggtgccgagcgagccgttgacgtactggcgatcggtgtcgttgcgcagggccatgacagccgcgccttccttgagtatcaatcgctcgggggccaacatgttctttttgagtcggtcgaccaggttggcagggcctgctgtctcggcgtggaactcgtgcggctcaagcatgatctggttcaggcgcatgtcgttgagattgtcggcctgccggttcaccgggaacaggtggacggcgacctggccgggctcgggcagtttgcccagacgagtgacgagcacgtcacggtcggactgggtcacgtcgccttcgcgaatgtcggtgagcacggtcagcagttcgccggtatcctgacggtgctgttcggtcagatagcagatcaccgggttgagttcgggccataccagcgattcggtgatgaagccttcggggttcaagccggcacgggcataccgttcgcgactggcgatgaattcgggcgtgggggcgatgaggtcgcggttgcgcccggacaccgaaaccggcggcagttggaagaagtcgccggacaagacaacctggatgccaccgaacgggcgtggatcacggcgtacttcgcggcagacttggtcgaccatgtcgaacagccaggcgtgcagcatggaaacctcgtcgatgacgaggatgtccgtggtctgaatcttgcgtttgcgccgggatttgatgagtttgagcaggctggcgctcagggcggtggccacgccgacgccgctccacgaatggatggtttggccgttgatatgtgtggaggcgatgcctgtggacgcggtgactgccacactggcgccgtcggcccgagcctgacggatgaactcgttcaagacataagtcttgccggcaccgggcgcaccggtcaggaacacgttcgcgccggcgttcagaatggccagggcttcggtttggcgcatatcaacctctctagactcccctcagggaggggagccaagtacggcggactacttattgaggatgctggtggctacgatgtcggcggcgatggccttggatgcggcatcgtccgggccgggggcgggggccataaacgccttgcggtagtagcgcagctcgtccaaggattcgatgatgtctgcgagagcacgatggccaccgttctttggcgggcggttctcgtacacggccgggtaccagcggcgggcgagctccttgaatgtgctcacatccacgctgcggtaatgcaggtggctcatgaggttcggcatgtaatggtcgaggaacttcttatcggagccgatggtgttgccggccagcagcgggcgcacgccttccggcgtgaagcgcagcacgtattcggtgaccttctgctcggcctcggccaggctcaggccattctcccactcgttgatcaggccagaacgggtgtgcatctggcgcacgaaatcgttcatgtggttcacggccttctcggacggcttgatgacgtaatccacgccctcgtccagcacattcaggtcaaagtcagtgggcactacggacacctcgacgagttcgtcgccgccgaagatatccaagcccgtcatttcgcagtcaatccaaatcaggcgcgaatcctttgcgctgtaagtttctgcatcatggctgtcgaccatggtaagcctcttttcgtcatgtcacccgttattacaagaacagttcagactataccccagcgcatacaagctatctcgagccacatacgcgaaaagggcctgcataagcagacccttttcacaaggaatcaacccctaactagcgcaagctagcgggcatcaaccgatcagttgttgtggaagccggagtagttcggggcttcggtggtcatcacgatatcgtgcgggtgcgattcgcgcagaccggcgtcggtgatgcggatgaacttgccacgctccggcatctcggcgatgttgtgggcgccgatgtagaacatggactggtgcaggccaccgagcatctggtagagcacggcgttcagcggtccgcggtacggcacttcgccttccacgccttccggcacgaccttgtcgctggaggtcacgtcggcctggaagtagcggtccttggagtaggacttcttgccgcgcggggccatggcaccgagggagcccatgccacggtacagcttgtactgcttgccgtgcaggagcaccttctcgcccggggcttcctcacagccagcgagcgtgccgccgagcatcacggaggaagcgccagccacgagggccttggcgatgtcaccggagtagtggatgccaccgtcggcgatgcagggcacgccagcggcacggcaggcctgggcagcctcgtacacggcggtgagctgcgggacaccgacaccggcaacgatacgggtggtgcagatagagccggggccaataccgaccttgacggcgtccgcgccagcctcaatcatggcctgagcaccggagcgggtgccgacgttgccgccgatgatctgcacgccgtcgaaggcggagtcgtgcttcaggcgggaaatcatgtcgagtgccagacgggcctcaccgttggcggtgtcgaccacgagcacgtccacgccagcctccatcagagcggaggcacgctgccaggcgtcgccgaggaagccgacgccggcggccacgcgcagacgaccctgctcatccttggtggcgtccgggtactgctcggtcttgacgaagtccttgacggtgatcaggccggtcaggtggccttcctcgtcaacgagcggcagcttctcaaccttgtgctgggcgagcagacggtgagcgtcgtccttggaaatgttggacgggccagtgaccaggttctccttggtcatgacatccttaaccttcagggtgtcgtaatcctcggaggcgatgaagcgcatatcacggttggtgatgatgccgacgagcttgttttccttgtccacaaccggcagaccggagatgtggaacttgccgcacagcttgtcgaggtcggccagagtgacctcggggttgacggtcagcgggtcggtgatcataccggactcggaacgcttgaccacatcgacctgagcggcctggtcgtcgatggacagattgcggtgcagcacaccgataccaccgttacgagccatggcgatggccatctcggactcggtcacggtatccatggcagcggagaggaccggggccttcatcacgatcttgcgagtcagatgagtgctggtgtccacttcggagggaatgacatccgtctcgttcggcagcagcaacacatcatcataagcaaggccgagcttggcgaaaatcggaggaaggggagcatacgccgattgggcgttcaattcatcgaggtttgtagccatacaaacactatatgaacacgcgctgaccttcacgacacacgcttgtgagcgctcacttatccgctgccgggtcctgcacctcacccgcctgcgagtcccgcgaatccgcaggcgaatcagtcatcgaatccgctgcctgagagccaatcgaatcccggctctcccctactgcagactgcgacttaaccgtagcatgctgcgcgttcttgcgtgcggattcgagcgtcaggttctcggcttggatctcgggaatacgatgccgcagataggggtacatcgtggctatggtcagcaccaccacggcgatgggcatgcccacggccacatgctgcgctttgaagaacagaatcgtcagcgaaccgaatgcgatcagcgcggcccatccccacaggatcagcacggcgccacgcaccgaatgcccgatcttcagcatgcgatggtgcaggtgcatacggtccggatgcatgggcgactggcctttggccaaacgccgcacaatcgccagacacatgtcgagcacaggcaggaacaacaccagaatcggcagcagaattggcatgaacaccggcagatagatgctggcatgaatcgaggccgggtcaagacgtccggtcatcacaatcgaagcgcaggtgatgagatagccaagcagcatcgaaccggaatcacccataaacagtttggcgggatgccaattatgcagcaggaagcccacgcagatacccaccatcatcacgtcgatcagcgtggccgacgaagcataactcggggaagaccgggcgatgatatacgaataggcggcgaacgctatgccaccaatcgccacgataccggccgccaggccatcgaggccatcaacgaaattgaccgcgttaatcgaggcgacaatcaggaatgcggtgatcgccatggacagactcggcgaggcggtaatcagcgaaccgcccaaaggcagtgagatgatctgcaatccgccccaagccacgaatacggaaatcagcagctgaccggcaagtttcagcatccaatcgagatcccacaggtcatcggccatgcccagcagactgatcatgatgccgccggcaagaatcacccacatctggtaattgccgttgaacaatcccgagagaaaaggcagccgactggcgaatacggtagccacggcaaaaccgatcagcatgccaaggccacccatgcgcggcgtgggaatggtgtgcacgtctcgggcacgcacctcgccaaccgcaccgatttcgatggcgacgtggcgaatcagcggagtcaccagccaggtgacgccaccggcgatggcggcaatcagtaggtagattctcatgcgccgagtccaccgccgttgaggtggagggccttgcgaatcacgttttgggcgatgacgccttcacgcaggatctcgatgccgtcgcgcgcgtacggatcggctttgacgacggtgctggagacatggccttgggtgggaccgccgtccagatacaggtcgacttcgctgccgaacgcgtcaaccgcctcctggacggtctgcgcgctttcgtcgccggaacggttggcgctggacgcggccagcgggccagtcgccttgagaatcgcgaggcacagcgccgaattggggatgcggatgccttgcgtgccggggcgaccatcggcggtgtcggccaaagtctccaacgtgcagtcgggccgggctacggcaatcggcgagaacgcgccaggcagaaacgccgccgacaaacgattcagcggggacggcaggtcgagaccgagctcatcaagctggtcggtggatgcgagcagtacctgcaacgccttatagcgcgggcgacgcttgagccggtagatacggtcgatagcggccttattacgcggatcgcacgccactccatataccgtatccgttggaatgacgaccaatccaccatcccggatgacacgcgccgcctgtgccagcgattcatccgtgactttcagcgttgttccgccttccacgctcacgccacctccgttcgcttgtgtattcacaatctaccattgcaccattgcgccccgacttgcatagttcatcatcgctcgtttgccgtactgccgttttccgattcgccccacacgcacagaccgtagatacaatgagtccatccatgctctttcgcgaaattacaggagtgttcaatgagcgaaatcaatgctgaatccaccaccatgcctcccgtcgaactgcgtatgccgcgcgccagcgagcgcgaggagatgctcgccggcaaactgtacaattcggtagaccctgaattgaatgccctgcgcgagaaggccggcgacctgtgcgcgcgcttcaacgccgcgtcgcgtaccgatcatgccgcccgtgccgcgattctcgatgagctgctgcccggccacggtgccggccttgacgtgatggggccgattttcttcgactatggctgcaacatcaccatcggagagcgcgtgttcgccaacttcaacttcactgtgctggattgttgcccggtgacgattggcgacgacgtgctgttcggcccgaacgtttcgctgctgccaccgatgcatccgttgcgttggcaggatcgtaacgtgaggcaggcacctgatggttccgcatacgactgcgagtatggcaagccgattgtcatcggctcgaactgctggtttggcggcaatgtgacggtaatcggcggcgtgacgatcggcgagggttgcgtgatcggtgccggctcggtggtgacgcgcgatattccgccgcacaccgtggccgtgggtaatccggcccgtccgattcgcgagattacggataaggatgcttccgcgctacagtattacgcgcagtgatatatgaatgctcccgctggcgagctgtcagcggagctgactgagggtggttgccggaaatctccgataaccaccctcagcctcacttcgtgaggtagctcccgccagcgggagcatagtaatgtgagacgtcacgcgccgaggtacgccttgcgcaccttctcgtcgtgcagcaggtcggaggccttgccctccatggtgatcttgccggtctcgagcacgtaggcgcgatccgcgatggacagggccatcttcgcgttctgctccacgagcagcacggtgatgccacgcttgcgcagcgtgacgatgatgtcgaagatctccttgaccagcagcggggacagacccatcgacggctcatccatgaggatggtcttcggatggctcatcagggcgcggcccatggccaccatctgctgctcaccgccggaaagcgtgccggccagctggcggcgacgttccttcaaacgcgggaagtagtcgaacaccatctcaagatccttacccagactggactggtctttgagactgaacgcgcccatctctaggttctcctgcacgctcatgcgggtgaacacgtggcggccttccggcacatgggccatgcccagcgtgacgatcttgttcgcatgcgttttgagcagatcgtggccatcataggtaatgctgccggatttggccggcaccagaccggtgatggtgtgcagggtggtggtcttgccggcgccgttggctccgatcagggagacgatctcgccgtcgttcaccttgaggctaatgcccttgaccgcgtcgatcgcgccataggaaacgcatagatccttgatttccagcatcagcgcgctccttccgtcagtgtcttggcaatgcttggctccggttccgccttggtggtggaatcgccgtccgcgtcatcgttgttgtcgctgcccaagtaggcggagatgacctgcgggttgttggcgatctcctccggcgtgccggatgcgatggtgcggccatagtccagcacctggatgcgctggcatacgctcatcaccaggctcatgtcatgttcgatgagcaggatggcgataccgaaacggtcgcggatcgtgttgatgcagtgcagcagatcctcggtttcggtggggttcatgccggcggccggctcgtcgagcagcagcagtttcatgccggtggccagggcgcgtgcgatctcgagcttgcgctgctggccgtacggcaggttggccgcctgggtggtggccagtccctcgaggttgaagatgcgcagcaggtcgatggccttctcgtgcatctcgttctcctgcttccagaagcccggggtgcggaagatggcgctgcccatgtggtaggtgaacgactcatcgaaggcgacgagcacgttctcctcgacggtgagctgcttgaacaggcggatgttctggaaggttcgggcgatgccggcacgcacgacctgataggtcttcttgccgttcatccgggttccgtccagccagaactcgccttcggtgggcttgtacacgccggtcagcaggttgaacaccgtggtcttgccggcgccgttggggccgatcaggccaatgagttcgcccttgttgatggtcatgttgaagttggacacggctttcagaccaccgaaggtgatgccgagatgttcggctttgaggatgggctgggttgcgtcgctcatcgtgaggcctccttcacggtcttgtcgtcggactggtcatgctgcttggcgctggccgcgggtttcgcgcccttgccggcggcgccgcggaacagcatgcggttgaccagacgcggcagtgagaactcccaggatccgaagatgccctgcgggcggaagatcatgacgagcaccagcaccaccgagtaggcgagcatacggtagtcggcgaaggcgcgcagcagctcgggcaggatggtcaggccgatggcggagacgatcgagccggtgagcgaacccatgccgccgaacaccaccatgatcacgtagttgatggagttgagccaaccggccatggtggggttgagcgagccgatgtactgggcgaagataccgccggcgatgcccgcgaagaacgcggagatcgcgaagacgagcaccttgaggtacgtggtgttgagtccggaggcgccggcggcgatctcgtcgtcgcggatggccttgaccgcacggccgtaacgggagcggccgaacatgaagagcacgaccacggtgaccaccatgatccagaacacgacgtacaggttggcggtgcgttcgatgccgatcagcgcctgtccggcggcgcccttgtcgaggcccatgccgccggctaccttgaggttctggatgatcacgcggatgatctcaccgaagcccagcgtgatgatggccaggtagtcgccgtgcagtcgcagggcaggaatgccgatcaggatgccgaacacgcaggccaccacgccgccgatcagcgtggtgagcaggaagcgggcggtggggtcgatggcaatgccggcggcgaccatgtatttggaggtcagtgcggccacgtaggcgccgatggcctcgaaaccgcagcatcccagcgtcagctggccgagcacgccgatggtgaggttcagggaggtggtcatgatgatggcgatgcacgcggtcatcatgatgcccttgatgtaggagtcggccaagccggattcgcacagcgccatcacgatgccgaacgcggcgaggatgccgatgaagcacacaagataggactgtttggtggaaagcattgtcttcttcatctgatcagaccttctccccttcgttcttgcccataatgccggacggtttgacgagcagcacgatgatcaggatggcgaacacgatggcgtcggagaacgccgaggtgatgatgcccgccgtgatggtgccgatatacgccttggtcaggctttcgatcagaccgatggccagaccaccgatcatggcgcccgggatggaaccaatgccgccgagcacggcggcgacgaacgccttcaggcccagcatggcgcccatcataggcgagacctgcgggtaggcggcgcagtacatcagcgaggcgaccgcggccagaccggagccgatggcgaatgtcagggcgatggtggagttcacgttgatacccatgagcacggcggcctccttgtcttcggagacggcgcgcatggccttgccctgcctggtgaatttgacgaacagctgcaggcccaccatgatgaccaggccgatgacgatggtcagcagggtgtctcccggcagcttgagcttgccgaacgcgatggacggcaggtggaagatggtcgggacggtctggaagtcggcgccgaagatggcctgtgagccgttctccagcagcaacgacatggcgatggcggtgatcagggcggtcatggagttgcccttttcacgcaccggcttataggcggccttttcgacgatcacgccgacggccacgcataccaggatggcgggaatgaccgccacccaggcgggcagtcccatggccacgatggccggaatggtgagcatgagcacgtaggctccgaccatgatgaaatcgccgtgggcaaagttgatcagtcggatgatgccgtagaccatggtgtagcccaatgccaccagcgcgtacacgctgccgattttcagaccgttgaacagctggctgatgaacatgatgatctgatcggtcatagctccccctttctatcaatgttgtggttctctaccgctgcgcgcgtagagatattcgtatgtcttgcgattgatggcgcgatacgcccgcgcctggcgatatccgcatatcggcggctgtccttatgcatccgagcccgtgaaaacacgaaagggagaggaccggcaaaaccggtcgctctcctgttcatgcggaagtcacgctaggacatcgtgattatgcggtgggaattcatggaattcacttgggctgcacggtggtgttgtacaccggcttgccatccttcatttccagcacgatcacggacttggtcggcgagccggacttgtccatggtgaacttgccggtcacaccgtcgaaggtcatgctggccacggcgttgcgcacatcctcacgggtggcgttcttaccggccttctcgatggcctgcttgatcatgtagatggtgtcgtagcccagagcggcgaacgtgttcggctcggcgttgttcttggacttgtaggacttgatgaagtcctgcaccttggtgttggtgttgtcgtcggcagagtagtgggtggtgtagtaggtcttgttgtactgggacttgtcaccggtgagcttgaggccatcgtatccgtcgggtcccatcacgtagccctcgaaacccacggagcgggcctgcgggatgatgtacgggccagccacggagtagtagtacggagcgtagagcagctcggcgccggaagcctggatcttctgcagctgggcggagtactcggtgtcgtcggcggaggaggagctttccttgtccaccacttcgaggccgagcttttcggcggccttggcgaaggcctcgcccacgccggaggagtacggatcgccggtgccgtagagcacggccaccttcttgaccttcaggttctcggcggcgaagcgtgcagccacctcaccctggtaggagtccttgaagcaggtgcggaacaggtaattgccggtttcgatggagtcggaggtggcggccggggcgatggtgaccagcttggactggtcggccagcggggccacggctgcggtggtggcggaaatggtcgggccggccacggcgagcacgttgttgtcgccggcgagcttgttgtaggcgttggaggcttcggtggcgtcgcccttgtcgtccatggactcgagcttgaccttcttgccgttgatgccgcccttggcgttgatctcggagaccgccagctcgaagcccttgacctcggcctcgccgtaagcggcggcggtaccggagttggtggtcacggtgccgatggtgatggagtcgccggaggccttggcaccggagctggaggaatcatccatgctgccgccggagcagcccgcgagggacaacgccataaccgcggccgcgctggccgcaacgaacttagtggagaacttcacgttcatcctcttccttcttccttgggatatttcaacatcgttcatctgtcaaccaacgcgcgggatgtgcgcgtgagacgttccactcacataattcgcataccacagaactacatcacacggcttgtgaccgtcattcacgtctctctcatccgatgtttgtcgcggactgttataaccagaccggctttgaacccgcaataaattgttcttattatgagacagcgcaattacggaaacgagaatacaatcccaaggaaatgtgggattcgtggggcttaggacactgcaaacaggtagcggtcgcgacccgtccagtcctggccggtcgatgcggcagcgaatccggtggccctggcaaaggccacgagacgatccccctgggtcacgtcatgttccatgacaagcacgcccccaggcttgagaagacggcaggcccgctcgataatgcgctcgggaatcaacgtaccgtccatcgagccgccatacaaagccaattccggatcccaatcacgcacttccggctgctcgggaatatcggtctgcggcacgtaggggggattggtgatgacgatatcgacggtgccgtccaattgggccaatgtggcgaaggacgtggcatccgcgatttccagatggtaattcgaggcaatggatgggtactttttcgcggtttccgacagattccttcgcgtccattcggcggtgttcggcgacagctccaccgcccacacctggctgccgggcacctcgctgacaacggacagcccaatcgcgccggagccggcgcacaaatcgaccacacaaggatggatcatgccgttttttgtcagccagtcaaggccggcctgcaccacggtttcggtttccggacgaggaatgaacactccgggaccgaccttcaggtcaaggtagcggaaaggagcgtgcccggtgatgtattgcagcggctcgcgcttggcacggcggtcgagcatggcacggaagacggcaagctgtccggttgtgccaagttcctcccccataagcagagccctgtcgacgtcgcgcagttcaacgcctgccgcctcggcaaggagcaacttggcatcatgctcaggcgtctcaatacccgcttcgcgcaattgcgaagaggcttggttgatgatgtcggtaataagcactggcggtctccgttgatcggacattaggctcccctcagtcagcttcgctgacagctcccctcacagaggggagccatccggcaaagtcatttctgattggccagacggtcggcctcgtcggcttggatgtcggaatcgatgacggcctgcaggtcgccgtcgagcacggcgtcaaggttgtaagccttgtaattcgtgcgatggtcgacgatacggttttccgggaagttgtatgtgcggattcgctcggagcgatcaagcgaacgtacctgcgagtgacgcatgtcggcggcctcggcggcctcctgctcatgcttcatggccagcaggcgggacttcagtacgcgcaacgcggcggcacggttctgaatctgcgacttctcatcctgcatgttcaccgtgattccggttggcaggtgggtcatgcgcacggcggaatacgtggtgttcacggactggccgccggggccggagctcatgaagatgtcgattttcaggtctttcggatcgatctcgatctcgtcgtcatcctcgtcggcctcggggaacacgatgacgccggcagcggaagtctggatacggccctgcgattcggtgacgggaatgcgctgcacacggtgtacgccgccctcgtacttcatcgaagcccacacgccgtcttcgggagcgggcgtgcccttggcgcggatggcgatctgcacgtccttgacgccgccgagctcggtggtgttctcggactgcacgttcacgctccagccacgcttctcggcgtaacgggtgtacatgcgcagcaggtcgccggcgaacagtgcggcttcctcgccgccggtgccggccttgatctccatgatggtgtcgcgcgcatcatccgggtcacgcgggatcagcgcggtgcgcagcttctcctcgacaccgggcagttcgtcttcaagacgcttggcttcctcggcgaagtcggcgtcctcgccggccatctcctgagcggctgccagatcgtccttcacctgcaaccaggctttgtaggcacccacgatggcacccagttcggcgtgacgacgacccagcttgcgcagcttgtccgggttggacacgacttcggggcttgccatctgttcttcgatggactggtactcctcaagcgcggttgccgccgccgggaactgttcgtctgccataacacactttcttctgtatggtgctgttctgttcgattattcgattgcgcaggtcaatgctgcaacaaaacttgtcaaagaatacaaaaaacgccagtcctcgatcgggtatgccggagcatgccaaatcgaatcggactggcgtgaagtatgctacttgctcttcttgccgtagcgcttctcgaagcgagcaacgcggccaccggtgtcaagaatcttctgcttgccggtgtagaacgggtggcactgagagcacacgtcaacgaacatgtgatcttccttgccagcggtgcgggtcacgaaggtgttgccgcacgagcacgtcacctcaacggggtgataatcaggatggataccctgctgcattttacgtctcctatggattcgggggacccgggtcgtcatgcccctatggcaagacgtgaaccggaacctaagggattgtacgcgcctatctggacgtgaagacgcgctgcgccgccgcaggagacgacgcaaaagagtggggccgcaggggcttgaaccctggaccgggcgattatgagtcgcatgctctaaccgactgagctacggccccacgttcgctgcgtaaaacagccaacttgccaaagtgtagcacgagcccgctaatgccggcacgcgcgccatgcacccataccatgcacccgccagcaacaagcagcatctcccggcgctacttctcccccatgtaccccaacgggttctcgatgaaccgtcgcaagcccatttcggccgcgccatatagcgagggatgcagcgccaccggcggcacaaacacgcgaatcttcacattcgggtatcccagaatttccgaacgcagccggccttcaagcacggtggccagctcgtcgccgaagtgcgtccacagtccgcccaacagcaccgtatcgacatccaccagattcacggcggaagcgatggcggaaaccagcgcatcggcggcctgatcgaccactttggccacatccgaatccccggctcgccaacgctggaggaacatatcgatggcctcgctgctggtggcatccccatcctcggcaatgccggcagcctcgaccaaagcgcgacggcccgcaaacgcctcaagacacccgtgacgcccgcagctgcacaacggcccatccatcgccacggacagatggccgatctcgccggcgaatccgtgcgagcccatcaccacttcgccgtcgcgcaccaccgcgccgccgatgccgatatcggtagacaggtaaataaaggagtccgtgcggtccaccacattcaggaagggcgcacgttcggtggcataccccggaatctgagcgatggcggccatcttcgcctcattgccggccaccacatccagccggcgcaccacgttgaaccgggtgaggttgacgttttcccaacccagattgcgggccaccaacagccacatgtcgtcggtgacgatgcccggcagcgcaaacccggctcccaccaccttgcagccgcgtcgtttgagccggctttccaacgggaaagtcatcgcatcgagcttggcgaagatctcgtacgggtcagtgccggtcatatcctcactcacccactcccggccgagagtgtcgccgttcagatcgagtgccaggcaaccgtaaccatcggtgttgatctgcaggccgatgccggcgatggatccgccgcgaatctccagcggcgtgctgggccgcccatatgtggtggaaacgaccggctcgccttcctgcaccacgccgctttcaatgagcatcgaggccaacagcgagagcgtggccttggtcaggcccgtctccttggccagatcggcacgactcatcggtttctgcgcacgcaataaggtgtcgagcgtcaccgacaggttatggttgcgcagatcctcctgattgatcctgcgtagatttgccattggcccctacctcctcgcacccctagtctcgagcgccgcacaggcgctcacatccgtctatcacaccatgatattgtgcgtcaaacgattgaatcggaccgcaccttcgcgtgtttccgtttgcaatcgaacgttgagatacagtatagtttaatcgtctaacttattggctatggcgcgccgaaacttttgagcgcgaccctcatcgaggaggaatgcatgacgagagtactggttgccggcgtagatacgtcaacccaatcaacgaaggtccgcatcacggacgccgccaccggcgaacaggttcggttcgggcaggccaagcacccggatggcacctcggtcaacccggaattctggtgggaggccttcaccaaggccgccgagcaggccggcgggcttgacgatgtcgcggccctcgcggttggcggccagcagcatggcatggtcattctcgacaagcagggcaacgtgattcgcgatgcgatgctctggaatgacaccagttccgccccgcaggccgccgccttgatcgacaagctcggtgcagctccggccgagggcgacgaaccggacgacgtgaccgcccgcggcaagcaacgctgggtcaaggccgtcggatcctcccccgtcgcctcctacacgctgaccaaggtggcgtgggtggccgagaacgagcctgagaacgccaagaagattgccgccgtctgtctgccgcacgattggctgagctggcgtatcgccggctatggcccggtggccgagggcgaggacgctcatctcgaagccctgttcaccgaccgttccgacgcttccggcaccatttactacgatgccgcgcatgacgagtaccgccgcgatctcatcgccatggtgctggcccctgccgagggcgaggaagccgccaaggcccacgccgacgccattgtgctgcccaccgtgctgggcccgcgtgaggcagccgccgtcaaggccgaccccgccattgccggcaaggacgttgaaggcggctgcatcatcggccccggcggcggagacaatgccatggcctcgctgggcctcggcatggccgtgggcgatgtgtccgtatcgctcggcacttccggcgtggccgcggccatcgctgaaaacccggtgtacgacctgaccggcgccatttccggctttgccgactgcaccggccactatctgccgctcgcctgcacaatcaacggttcgcgcattctggacgccggtcgcgccgccctaggcgtggactacgacgaactggccgaactggcgttcaaggccgagccgggtgccggcggcatcaccctggtgccgtacttcgacggcgagcgtacgccgaaccgtccggacgccaccgcctcgctgactggcctgaccctacacaacaccaccaaggagaatctggcccgtgcgttcgtcgaaggcctgctgtgttcccagcgcgactgcctcgagctgattcgctcgctgggcgccgagatcaaccgcatcctgctcattggtggcggcgcgaagtccgtggccatccgcacgctggccccctcaatcctcggcatggacgtgacccgtccggccaccgacgaatacgtggccatcggcgccgcccgtcaggccgcctgggtgctgtccggcgaggccgaaccgccgacctggcagctcaccatcgagggcgtggagaccggcgagcccaccgaagccgtgtacgaggcgtacgccaaggcccgcggctgatacgctgccagcaaatccatgagataacaactgaataacgattcctgatgaatgccgccatggcgagcatcgcgaagagccgctgttataccgcgctcctcgctgaagcacacacgacggcatttttcgtttcccacgcaatccacaaatacggctataatcaagtcgtttgaacaagtctggagatgatccgatgaacgaccgctcccgtatgatgctgtacgccctgaccgccgtcgcctgcgtgatgtggatatggcagtctgtcaaagagtcgatgaacgacggcacgatcatcagcacttcgaacatcatttttctggtatgcattggcatcgcggccatctactgcgcggccaacgcgctaatcctgtggtggcgccagcccggcaaggatgacgcggctgatgacgacgaaaccgacagcacggacgccgaggccgaagccgaacaagccgaagaaaacgaacacgacgacgttgccgacaccgcagacaccgacaccgcagacgccaaagaaaaccacaacccacagcactaaaggaacatcatggatgcaaccacattgtcaataaccctcagcgcgatattggccgtcatctgcacaccttgcggcctgtttctggggcttgttcccatgaaggccgacctggtgaccgccaagcagtcaaaggcctcgcagatggtgagcttcatcgttgccatagtgttcatcggcttgctggtcgcaggccatgatctggagacctgggccatggtaatcggtctggtcatcggcttcgccgttgccaagatccccgcactgcacgcctgggctttgcacaagtggccgttcttcgaacccaagaaaatggctcccacccccaagcgcgtcaagaaagccaggaagaagtaagctctggccttacctattcgctgaaagcgggatatcgacatcggtatcccgctttttcattggccgcacatatccgctgaggcacatcgccgaatcatattgtcgaaatacaccccaagtcagggctgatttcgcgaagaacgtacaccgggatccatccatcgcgacaaacggaaaagggacgctgcgtgcaacagcgtccctttcggaggaggaatggaactcaggtccatccccgtggccaccgggcgggcccggaggccaggtttagctcagcctttctttttcttggagagcaggtcgtaggcgacggcggcgatgacgacgaggcccttgatggtcttgacccaggcggcgtccacgcccatgatggacaggccctggttgagcacgcccatgatcagggcgccgaccatggcgccggggatggtgccgatgccgccggtgacggccgtgccgccgatgaagcaggccgcgatggcgtccatctcgaactcatgccgggcctgtctcgttaagtgtgtaactggcgttttcattgttgtgttccctcgcttggccagcggtcggcgaaggtgatggcaaaggcgttgagcgcgggcttccagcgcgcgctccatcgtatccgtcccttgccggtggggtccagcgagcggacggtcaggtacatgcacttgagcgcggcctgctcgtcggggaagtggccgcgggcgcggatggagcgcttgaatctcgcgttgagcgattcgatggcgttggtcgtgcagatcacgcgccggatctccacgtcatagtccaggaacggtatgaaccgttcccacgcgtccatccacagcctgcggatcgcgggatatctcgcctcccacttgtccagcatcgcgtcgcgggccgccgccgcggcggcggcgctcggcgcggtgtagatgggtttgacatcgcgtttgatggcgtcccagtccttcttcgacgcgtggcggaacgtgttgcgcagcagatgcaccacgcaggtctgcacgatggccagaggccataccgcgcccaccgcgtcgggcaggcctttgagcccgtcgcagatcaggaagaacacatcgtccacgccccggttcttcagctcggtgagcaccgacagccaatagcgtgcgccctccgcggcgggcgacgcccagatgcccagcacgtcgcggccgccctccagatccacgccaacggccacgtagaacgcgcggttggcgacctgcccgtcgcgcaccttgacgacggtcgcgtcgatgaacacggccgcgtacacacgatccaggggacgcgagcaccattcgtccttctcggccacgacccgctcggtgatgcgactgacggtctccctggacacgtccgccccgtagatctcctggaagtgggcgctgatctcgccggtggtcaggcccctggcatacagggacagcaccacctcgcccaccccgggcagccgccgctgccgtttcctgacgacgaccggctcgaacgagccatcgcggtctcgcggcacctcgatcccgaccggacctaccgaatcggtgaccacggtcttggcggtggtgccgttgcgcgtgttcgcggccctgccgtccttggatttcttgtgcttggcgcggcccaggtgctcggtcatctcctcgtccagggccgtctccagcacgcttttggtgaactgtttgggcagtccgtcgggccctgtcaggtccagtcctttttccttggccatgcgcacgaatgtgagcgccgcctcccgctcggcgttgcgtttttccgcgtccggcttcttcgtcggtgtcatgtttccccttgtcccagcagacatcgtccaccagcctttccgaccggccacacgaccggccagttaaggccagttacacacttcgagagacagtcccgttttcagcggaaggagagaaaggaaagaaagaaggaatggaaaggtgccatgcgggcataacacaacaccgcacatggcgaaactatcgaatcagcccatcgggcgcactggcatcataattgatgtgtacacgcccgatggagcgaattcaatcggtcagaccgatggtcactcgacctcagccagggcatcaatgatgtagttgttgatggtggccttgacggactcgaggtgatcggacttggtggcggcgatgagctcggactgcggcttgtcgaggctgtaggcttcgaggtcggccaaggtgacgttgccctcgtcgatgtccttgccgatgccggagtcgtaggagctgtagcgctcggcctgaagattctggatgaagccgtcctggttcatcttgtcggcaaccagcaggccggcggcgtaggcatccatgccggcgatgtgggagcggaacaggtcctcctcgtagaaggaggtacggcgcggcttggcgtcgaagttcagaccaccgtgaggtccgatggagccggcctgcaggacttcccacatgacggcgacggtctcgtacagatcggtcgggaactcatccatatcccagccgatgagcttgtcgccctggttggcgtcgagggaaccgaggaagccggactcgcgggccacgcggatctcgtgctggtaggtgtggccggccaggttggcgtggttgccttccaagttcagcttgaagacgtcggtcaggtcgtggttgcgcaggaactcgatggcggtggcggcatcgaagtcgtactggtgcagcgtcggctccttcggcttcggctcgatcaggaactgggcctcaaagccgatttccttggcgtaatctgcgcacatgtggaagaacttggcgatgtggtcggtctcgcgcttcatctcggtgttccacaggttctcgtagccttcgcggccaccccagaacacgtagttctcggcgcccaggcgcttgccgatctccaagctcttcttgagctggccaccggcgtaggcgtagatgtcggcgaacggagaagtggcggcgccggacacgaagcgcgggttggtgaacagggaggaggtgttccacagcagcttgacaccggtggacttcatattctcgtcgatcttgtcaacgaccttgtcgaggttggcgttggtctcgcgcagggtgtcgccttcgggggcgatgtcacgatcgtggaagcagaagtactcgacgcccagcttctggaacagctcgaaggcgtagtcgaccttggccagagcctggtccatcggatcggtgtacttgtagtacgggcggtgcgcggtgccggtgccgaacggatcaaccagttcctggttgaaggtgtgccaccaagcaacgccgaagcgcagccaatccttcatcttcttgccggcaacgaccttgtcggcatcgtagtaatggaaggcgaagtcttccttcggtcctttggcgcggccgacgtactcgatcttgtcaacatcccacagacccatttgggcgctcctttgcagtaggcgatattacggattgcaggaccaataataaaacgaacgaactaagtttgtcaaatgattgaattaatacgccgcgtctcagcgtgttgctagtcattgcaatggttttcgaatgcagtcaaggcacagatagtatgggcaagccaagaaagacaactcagccaaggaaacgagacttgataattgacgtcacgcaattcctcgccggccaccgctgaggccggctccaccaccccgccaactccaacagcaccacccccgccaacaccaccgccatggtcatcaccctgatgatcggctcgtttgtggccatcctcaaccaaacgctgatgatctccgccctgcccacgttgatgcacgagttcgacgtgcccagcagcaccgtgcaatggctgaccaccggattcatgcttaccaacggcatcatgatcccgatcaccgcgttcctcatcgagaccttcaccacccgccagctgttcctgtacgcgatgggcatatttgcagaatgatcttggcgttaatgcactggtgtccggtctggtgatgatgccgagcggcatcgccatgggcatcctgaacccggtggcaggcaagatgtatgaccgtatcggtggccggccgctcgccttactgggcttcgcgatcatgacgtctgcggctgtgctgctggtcaccatcatgaacacgcacaccgcggcggccatgcgcaccggagtgccggaagcggcggcatcggccattggcgtgcgggcttcgttccgcacggtcgccattgtgtgcgcggtctgtttggttgcgtcactcttcattcgtgatcgcggccgccgacttggacagcagcgttaggcgaatccttcaccgattgctggccttcttgatcagcgcgtccaaagtaccggcttggcgcgcggcttccacatcttcccagtcgagaccggtgtctttggccctcccgtagaaaaaccgcaccagaccggcaaagtccggtttatatccggtttcccggaatgaacgggccagcgaatcaccgatttgcgggtcatcaggccttcgtgcctcatagatcgggatggaacaggatcgccacacgcctctcacatgtgcgatgcgattgacgatcatgccgccgtgcgcaccatcgtattgcgaggcggcatgtacgtccgccacctcgtagacaccaccatgaatgatgtcctcaactgtcagacgacctttgaccgcgctggcatcgcgaatccagaacatcgaagcgaaattggtgtcatcaagttcgcgaaaatcacgtatctcgcgtgtgccgatacgttcgtccttgtcatacatgaattcggccaaggctaggaatggcgagatacctgcgcccggaccgtactgcaattcgatacgtaaatcttcggattcattgccggtcagtccaataccgctgacggcgcagtcataggcaaaccaatcccagaaccaccattcgatcctttgcagcacctgcttcggatactttttgcatgggttcagattcacttcgcgataatatatgcgtctcgcttcggcatagacggcgagattgcagcgtttgaacatctcggctacgtctttggtgtccagcattgctggcaaaccggcattttcggcagtagtagtgattgcggtgctcatggtgtttccccttcatgtgatgtggacggcgggctacgttgcccgccgtgaggcacactgtatgacgttcgtgcggtggctcgcaagcccacatggcgagatggtggataagtggaaaacccaatgattccaaggggtatggaatgtgcataacagtggctaccgtcggtggataaccgcactttcttgcaggttatccactgatcgcgcagctgttatccaccgtctctgggttatccacatcgtctctggcgtgtcgtccactgtcagcagtcgatttctgcttcgtttggcgtgtataagtgcacggtgaagggggctgcggacgttttcttggagatagtcatgcagccattccttggctttgacgatattgtaccggactcatccagcccagcgactgtttgatgcgctcgtggttgtaccagtggatgtactcgtcgatcaggacaagcacctcgtcgcgggtgcgtttctcccaatgctcgggatagacggactccgtcttcatgcgaccgaagaatccctccgcggcggcgttgtcggggctgcagcccttcgcgctcattgagcgcgtcagcccgtagcgttccatgagctccagccatccgggccaccggtagtggcatccccggtcggaatggaccacgggacgggcgttgtcgggcagcgtctccgccgcctcggcgagcatccggttggcgagctccgcgttgggatggaagccggccgtgtaggcgacgatcttgccgtcatggcagtcgatcatcggcgagaggtacaccttcccgtcgctggccttgatctcggtgatgtccgtgagccacttctcattgggccgttcggcggtgaagtcccggttgacgagattaccgggagcgggcgtggtctccccctcgtaggagctgtaacgccgccgtttgggaacatgcgccgagagcccgccctcggccatgagcctgcggatcaccttctccgagacgcccgtcccgagcgcggccttgacgcgacggtacccgtacctgcccttggagtcggcgaacgcccgcgccacgcgggcgcgcagcccggcgtacttgtcaacgccgatcctggcatggtggtagtggtagctgctcggcgctatgcgcagcaagcaggccatcgacctcagcgaatacctcggcctcagccggtcgatcagcatcgtcttctccctgttcgacaggcgccgcaggtcggcgcctgggtctttttttacgacctccaccacctcccgcatcaacgcgttctccaactccagctcctcgaccctacggcgcaacgcctccacgtcatcgccgcccccggcatccgccccgccccgaggacggacggacgccgatttcccgccctgggcggcattctggttccggggctgcaacgcggccatgccgcccctgcggtacgccctgacccagttgtgcaccgcaccaacgctcacgccaagctgtttggcggcctgcttctgctgcatgccgcccagcaccagttcgatcgccttccgtcttgtctccagaggaattatgggtttggccatacggccagcataccggggatccatcgccagccagcgttccaggcactgtctggtcggatagcccaggcactccaccacctgcgcggtggtcatcggcgttgtgaggtatagctccaccgccctcgaacgctcctcaagactgaacatacgagaaacctttcgctcagtctccaagaaaacgtccgcagccccaagtgtataactccgcgcattaggcatatttgctactgagaaaggtcccgaaatcgccttcgaacgcatagctacactcagcagatgtattcagcatggcaatagacccacttaggcaccagcgaatgatttccccccgcttatagagtcggcaaaggcccaacacctgtcccaacgccgacgctactgcactggcagcgtcggcagaggcccacgacttggcacagcaacgacgctaaaaccgcccagcatcgttacacgtccaagttttggccgctaacgacgcttaatgaacgcttagcgtcggcagcaggtcacgcactggttctccaccgacggtagcgctccttagcgaagccagcccgccactctttggcacatcaccgacgctgagagaacctccagcgaagccaaccagccaaccgctggcgacatgacaccacccacacccctcagcgaagccaacctgccagcgcatggcaccccaacaccgatgagaacacccaccccaccagtgcacaaaaggctggtcatagcggttgcgatgtaatcgcatcgtaatcgcgatgaccagcctcgggagttgggctgcaatgagcaccaatatgaatcagataatgatgccgttgcagtgatcgacttcatgctggataatctgcgcagtccaaccggcgaaggtggcgtggcgggcgcggaaccgacggttctcgtagttgacctcaatacgtcgataacgcagcgtgcggcgttcgccggtcagggacaggcatccttcctgggtatcgaaggcaccgtccgaagcggtaatcacggggttgagcatcaccgttatgcgcccgccaaggtcttcatccacaaagacgatgatgcgtttgcctacgccaatcatgttggcggccatgcccacgcaccgtgaacggttggcctccagcgtgtctacgaggtcttcgatcacctgctcgtcgccgggcccggccgcttcggacggcgtgcgcaaaaacgaccgcgaagtcataataggacgttgcatgctggaatcacgcttcttcgtgccaatgggggttctggccgaaggtgtgaccttcggggttgtccattgcggcgatatcggccatgtcctgatcatcgagttcaaaagcggtcaggtcgaggttctgacgctggcgctccgggttcaaggacttcgggatggccacgtcgccgtactggaggtgccagcgcaaaatggcctggaccacggaaataccgtgcttggcggcgatacgcttcaggtccgggtcgcgcagcatctggttggcgcggcccagcgggctccatgcctcggtgatgatgccgtgcgcattgtcgtaggacagctgttcgcgctgctggaagtacgggtgcagctcgacctggttgacggccggcgtcacacctgtatcgcgaatgagcaggtcgatgtggccgggcaggaagttgctgacgccaatgtgcttgaccaagccgcgttcgcgagcttcgaccagcgcttcccatgcctcgacgaactggccttggcttgggttcggccagtgaatcagatagagatcgatgtagtcgaggcccatacggcacacgctctcctcaatggtgagcagagcctcgtcgtgagcatggtggcggccgggcagcttggacgtgacgatgatgtcttcgcgcggcacgccggattcgcggatggcgcgacccaccacaccttcgttctcatagttgaacgcggagtcgatgaggcggtaaccctgatggatggcggacttgatggcgtccacaccggctaggccgttgaccttgtacgtaccgaagccggtggcgggcagttcgaggccgtcactggccttgcggatcggagtgactggtggttcatcaagcatgatagttcccctgcttctcctgtgatggaatatcggttccatcataaagccaaccaatccgctgcgggcgtactatttgacttctctcaattccggcggtcggcgagtggagaatcggaacatgagcgcggcgagaatcacgccaagcacggccatgccggtgaacaccatcatgctgcgcgggaacgcggccgtatacgaaccggccgcgtccgccccatcgttcgcggcgatggccaccacccacacattgccggacagcgcaacgaacaccacatccataatcatggtgccggcgaagccgctaaggatgaacttgggcgggaagtggttcttcagcatgccgccgaataccgggccgatggccggtgcggcacaggtggccaggccgactatgccgagcatcgcaccacgctgttcaagtggcgccttctccagaatgatgttggtgataagcggcagggagatgccggtaccgagcgacatgaccagtcgggcggcgagcagcatcgggaagttgaccgcgagcgcgcccagtaatgtgccggcgatgaaaatcacgatggccatgatgaacagtgttttggtggcgaatttgcgcaccatgaacggcgagctcggaatcgacaccgacagcaagagcagataaccggtgacaagccactgcaccaccgaggcgccgatggagaactcctccatcggcgtggagtaggcgatgttcagtgacgtttccgataggatgccgaggaaggtcaggatcgcgagcgagacgaccgcgatgacgagtttgttggagaccggttgcttgccgccgttaggcagctgtgttgcggaatgagtcacgatcttgttctctcctccattcattcagatattctgactacgacgttggaagtcttcctgcatgagtcgcagagcctcggtcaaggtgcgtaccgtggtttcgcactggtccgaggtcaatccgcccagcagttggctcaaatgcgcgtgatattcctccacatagatgcggcggatatccaagccgcgttcggtgagcgtgagcgtcaccgcacgccgatcggcggcatcggcgtgtttgacgacgagtccgaggtcggccatttcgccgacgagcttggtgatgctcggcgtagtgacgccgaggaatgtgctgacgtcgcccacgcgcgcggtgccggtatcttgcccattcggttcgttgatatgccagacggcgtcgatcacgtggacatagcgcggtttcaggcctttgggcagtgccggcatcagctcggtgatagccttcgctttccagcagacatccaggaggctccgcacctcattcaccggaagcaagccggtcttggtatcggttcgggaatcgcacatcgctggcccaacctccaattagttaccaatagtcattaccataagtaactatatgcaggctctagacaaacccaacgacctgcgcgcccgtgtcgagttccgtttcgacataaaaaagccagggaatccctggcttgcaatgcacatatcgctgcagatttgccgggaccaatatgtccccggcaacaacagccgtatatacgctaccgatcagtgctgccctcatcatccttggcacccgccgtggcggcctcagtctccttggcgttccacccggcgacggcattccaaccactccatccgatgaccactagcaagcacagcgagaagacaatagtggcccaattgaacagcgagccatcgttattggcctcgaccagtgactgccagagccagataacgcaggccaagcaggtcaatgcatacatacgggaggtggagcgcgcggtgagtttcatggcggaaaaagtcctttgattacaagaatgacggcagctaacagtgtgggatccgcaccagcggcaccggcacgaatcccacatcgaggaggagaaaggggaaggtcagctcttcttgcgcttggacatgatgtccacggcgacggccagcaggagcacgaggcccttgatggtcttcaccacggcggtgtcaacacccatgatcgacagaccctggttgataacacccatcacgaatgcaccgatcacagcgcccgggatggtaccaataccaccggtaacggccgtgccaccgatgaagcaggcggcgatggcgtccatctcgaactccataccggcctgagcagttgcggaagccagacgggagagcatgcagacagcggccactgcggacaggaagcccatgtggacgaacagcaggaagtccacgcggcgggtgttgataccggagaggatggcggccttgcggttgccaccaacggcgtacacgtggcgaccgaacacggtcttggtcaggatgaagttgtagatgaagaccagcacaccgacgatcaccagcatgatcggggtaccaccctgatcagcgttaccggaggaagccagcaggtaggtgacgaaggcgatgacgaccgcggcaagcacaattttgaggacggtcaggctcatcggctcgggcaccaggccgaccttggccacacgggcgcgcttgcgcagctggctccaggcaaagccgacgatgcacaggatgccgagcacaatggtcagaccatcgaacggaccccaccagccaaggatgttgggcaggtagttacgggcaatgccacggaattcgagggaggtaatcggcacggattcgccgacgatcacggtggcgagaccacggaagatcaacatgccggccagagtggtaatgaagcccgggatgccgatgacggcgacccagaagccctgccagacgccgacgatcaggccgacgaccagagcgatgacgatggcgagcatccagttgactccggcgcgttccatcagcagtgcacacacaccaccgatgaaggctaccaaggaaccaaccgaaaggtcgatgtgggtggcgatgatgaccatcaccataccaatggccaggatgatcacgtaagcgttctgctgaatcagggacacgaaggagttcggcttcagcagcacgcctccggtcaggacctcgaaggccacgacgatgaccagcagtgcgccgacaataccgtattgacgggcattgttggcaaccgtggccagcaggccggtcttttcttctttctttgcaggtgttgcagttgcggcgctcatcaggctgccacctccctttccttggtcatacccttcatcaggtattcctgggtaaatccattcttctcaacattgtcggtgacgacaccgtaggacaccgtgtaaatgcggtcacagataccgatgagctcgggcagctcggaggaaatcacgatgacggccttgcctgcatcggcaagcttatcgatgatttcgtagatctcatacttggcgccgacgtcgatgcctcgggtcggctcatcgaggatgaggatgtccggctgcgagataacccacttggcgagcagcactttctgctggttaccaccggagagggtggagacattcacatcgatgtcatggcacttgatgttgaagtccttgcggtactgttcaacttccttgcgctcaaggttgtcgtccacaaccccgcccttgctgatcttggtcagggaggccagggacgcgttctctcggatgttctgcagcaggttcagaccgttgcccttacgatcctcggtggcgtaggcgagacctgcgtcaatcgcggactgcacgttgggcatcttgacttccttgcccttgacgaacaccttgccggagatgttggaaccgtaagagtggccgaagatggacatggccatctcggtacgacccgcacccatcagacccgccagaccgacgatctcgccggcatgcacgttgatgttcgcatggtctacgatcacgcgctccgcgtcgagcggatgatgcacggtccaatcctcgacacgcaggtattcctcgcccggggtattggaggggtggttcgggtacaggttgtgcagcggacgacccaccatcttgcggatgagttcttcctggtcgagcggcgtctccggcgtcacgtacatcacaccgacggtcgaaccgtctcgaatgatggtgacattgtcggcgatggcggcgacctcgttgagtttatgagtgatgatgatgctggtcacgccctgctcgtcacgtagctgacgaaccaggtcaagcaggtgggcggaatcctcatcgttcagtgcagcggtcggctcatcgaggatgagcagcttcacgtccttggacaatgccttggcgatttcgacgagctgctgcttgccgacgccgatgtccataaccttggtatccgggtcttcgggaagtcccacacgatcgagcagcttcttcgcctcggcacgggtcttgtcccagtcgattacgccacccttggcctgctcgttgccgatgaagatgttctccgcaatggacaggaacgggctcaacgccagttcctgatgaatgattacgatgccgtcggcctcggaatcattaatagtatggtatttgcattccttgccatcaaaggtgattttgccggaatagctaccgtatgggtacacacccgaaagcacgttcatcagggtcgatttacctgcaccgttctcgccgcagatggcgtggatctcgccgcgatcgacggaaagattcacatcggtgagggctttgaccggaccgaacgtcttcgtgatgttttccatcgtcaagatggtgtcatttgatgacatgtcaccactcctcgtcacagttctgtgttcatggacatgcggcgcatatcggctatgcgccgcatgtcattgtgtttgtttacggattgcctgatgaggactacttagtcagctcgtcgaagcgatcctgggtgatgtagttggccgtgaccagatcctggaggttgtccttggtgatgttctgggggtcaagcagcttggacgggacgtcgatgttgttgttgttgaacttgccgttcaggccggagacttccttgccctcggcgatctcgacgaccatgtcgtacacggcgtcagccagcttgttcacgtccttgaacacggtctcgccctgcttatccttggcgatgttggcaactgcgatctccatggcgtcctgaccggtgatatacggccaggagtcggtgcccggcttcatgtcgggacgcttggattcgatggcgttgatcacaccctgggcgatgccgtcgtacggagtgaggaccgcgtcgagcttctcgccgtgggcgtaggtggagtcaaggatggattccatgtccttctgcgcctgctcggtcttccagctcatcacggagatcttctgccaatcctcaacggtgaagtccttggtcacgccaccctgaccgtgctgggacggggagacgagcacgcccttctcgaagtacggctgcagcagatcccaagcgcccttgaagaagtacttggcgttgttgtcatccggggaaccggtgaacagctcgatattgaacgggccggtggcgccatccttaagcttgagctggtcaatgagccacgtggcctcgagcacgccgacctgctccagctggaaggtggcgtagtagtcgacggcgtcggtgttcatgatcagtcgatcgtaggcgatgaccttggcgcctgcatcgcgggccttctcaacggcggggcccactgcggtgccatccttggaggcgaccacgacgatcttggcgtcgttgttgaccatgttctcgatgtcagcgttctgctgggccggcttatcgtcggcgaaagacaggatgaccttgtatccggccttctccagcttggccttcaggttgttgccgtccttgttccaacgctcttcggacttggtcggcatcgaaatgccgatagtggcacccttttcgatcttggcatcaccgccagttgcctggccgctacggctgccaccacaggccgcgaggcccgcgcacatggcaacgcctgccaccacggcgacgatcttcttagtgaacttcatttgctctccttcatcttcgaggggatggcgaaccctccttggtcgcccgaacctgagaataacctcaggttcatctcatagaataccgcattaagttaagttgtcaaactcaagaaagcgaatttcccgtcgtttgcgttcgaccaatgaacgcaatggcgattttttcgcgcatcacaaggcgacacgccgaaaaatccacgctctgcgcctcgctgtgcctcatgccggtaacgactacactggattcttatggcaacaaggcttttcggttcgcagacctcgcttcgcgaggcaaaccgcgccaacttgctggccagcatccacaagttcggcgccatgacacaggtcgaactcgcagaggtgacaggactgtccactgcgaccgtgtccacgctcgtccatcagctcgtcgacgaagaccagctggagaccaaaagcaccgttcgcaacggtcgcagagccactctggtgacccttgcacggcatcagggcctcggcgtcgggctttggatcgcgcgacgtcatcttacgctttctatcgttgacttctcgaagtcaatcatcgctgagcacacgctccccctgccgttgggccacaaggcggacacaacgctggaacgcgccatgctgctcatcaatgagaccctgagcagcatcgacgccgaagccagcgagctggtcggcatcggcgtggccgtggccgcaccggtggccaccagcgaccacaccatagcgattcccggcattctgcccggatgggacggcgtcgatatcacgtccccgttgcgcacggcgttcaacgttcccgtatacgtcgataatgacgcgaatttcgcggcatacggcgaatcccgtatgggcgtggcggcaggcaaacgcaatttcgtatatatctcagccagcgacggggttggcgcaggcatcgtcatcaacggcgaaatcatgcatggcgtgaccggcctggccggtgaaatcggccatatccaggtcgacccgctgggtgccatctgttcgtgcggcaaccgcggctgccttgacaccgtcgtggcggaaaacaggctggtgcagttgctcagcgtcacacacggcaatatgacgctggatgatctggtgtcctttgccaacgaaggcgaccccggttgccgtcgcatcatcgccgacgcggccgtgcgtatcggtcaggtggcggctgatctgtgcatcagcgtggatccggaggtcattgtgctcggcggcaagctggccatgaccggcgacgtattcatccaaccgttcaatgaagcgttgcagcgcatgctgttccctgatgccgtggcacccatcgatgtactcgtgtcctcccacccggacgacaattgcgcgctaggcggcgcattatgcgccatcgagttctcggttcgcaatgacgtcagccagtgaccggtaccaggagaagagtgataagaaggaacacaccatgaggaattcgagcacacctcctctgctgcggctggaggacatctgtgtgaagttcggcttcgtcgaggcgttgaaatcggtgaatctgtccatccagcgccaggaggtcatcgccatcgtgggcgataacggcgcaggaaagtccactctgatcaaggtcatcgcgggatttctgcagccgggattcggccatatttatctcaacggcgaacaggtgaccattccctcgatcagggaggcggaccgcatgggcatcgcatcggtgttccaggggcaggagttctgcgacaacctggacgtggcctcgaacctgttcctcggcaaggagatcaatcagattggcatacgcgatgacgattcgatgaactcgcgtgcccgttccgtgctgaagaccctgagctcggcgattcgggtcggctcccctatcgcatccttatccgtcggccagcgccagaccgtggccatagcgcgcacgctgctcaatgacccgcagcttattctgctggacgaaccgaccgccgcactgtcggtgatgcagtcggcggaagtgctcgcatatatcaagcgactgcgctccgaaggccggtccgtggtgatggtctgccacgatctgccggatgtgttcgcggtatccgaccgcattgtcgtgatacgtcaggggcacgtcaccggcgtgcatcgaaccgtcgaaacgtcctatgaggagattatcgccgaaatcgccggcgtgaccaccgaacacgagtatgaggaaatcgccgagaacccgaaattcgattccatggtcaggcagcggaaactcatcgaccgcactatcagcgcggcagtgagccatggcaccggccatgactcaccattagactaacgccccgttgccggagcggcatcgtcagcgcagagccaggttggcggcaccgatgaggccggcgtcttggccggcggtggcggcgacgatcttggcatggccgcggtaggcgctgccttccaggaaacgctggtagttgtagcgggccggctccagcagaatgtcgccgacggccaccacaccgccgccgatcacaaacaggtccggatcgagcacggcggagactgcggccatcgtgcggccaagccattcgccgatcttgccgaatgcgtacaggccgagcacgtcgccttcctgggcggcctgggagaccatcgggccttccagcttggagatgtcgccgccacacagctccatgagacgcttggcatcctgcggacgacggcgcacggcggacttggcgaagttctccagcgaagtgcccgaggtgtagcgctcggcgcagccgcgcaggccgcagccgcagtggtcgccgtccgggaccatcggcaggtggccgagttcggcggccatgccgaaggagccgcggtacagctgaccgttgatcacgatggcgccgccgaggccggtgcccacggtcagggcgaccatgttggagctgccctggccggcaccgtgcacgtattcgccccagccggcgcagttggcgtcgttctcgacaacgaccggcacggcatggtcgatcagcgcgccgacgtgctcggacaggtcgtagttgatccaggccgggatgttggcggagaaggtgagcgtcttgcggtcggcgctcacgttgccggcggcggagatgccgatggcctcgatatcggtgtgtccggcggccacagcctcgcggtacacctcggcgatgtgctggttgatggcgtcggcatccatcggcgtggggacgcgccagcgctggatgatgctatcgttttcatcgcagacggcggcggcgatcttagttcctccgatatcaatggcgagcgtggtcatggcttactccttgaaggcttgtgtggcgtacgagacagcgaaaatagtaacgagttgccatgacctcccatagcgtatttttcatgatttgtcatatctcgcgcacgttctgccaatgtgaccctgcacacgtttttcaccatttataagcactgttaacgctaacgttgtcattcaatagcaaacgttgtcattcagactatcggcgtgtcgagcagagccccaaggccagcacgaaaccttcggtatttccatgcgatacggcatcggcatcgactgaaacagcttccatgccagagtcgaatggccatcaaacgactaaacaccagacacacattttggcctataaccccatatttcgccctacaccacgaaatacggcaaaagaacaaaaaagctcctgacatttgtcaggagcttggtggcgaccccggccggacttgaaccggtgacctccgccgtgacagggcggcgctctaaccaactgagctacggggccatctgtacctcaatgaagcacaagaggatatactacagcatcactggaccacggcgcgccgcccggcgcgtcgcgccacggcaatgtcaggcccatccattacccctccaagccatagcgacgcccgccattccagcccttccgataccatggtgggcggtggtttggcgtggattcgatcgttatgcggacagggcggcacaggcctgacgcggcgcaccgcgatccgtgattcggggggcgtgctccgcgctgcacacagcgtatccatcacaaactaaagactaaagaaacagcggaattccaacccctttttaaggagtaactgcacaacatggcagaattcgtatttcagatgatcaaggcccgcaagtcttacggcgaccgcgtgattctcgatgacgtgaccctgagcttcctgcccggcgcaaagatcggcgtcgtgggcccgaacggcatgggtaagtccaccctgctcaagatcatggccggcctggagaccgtgagcaacggcgaggccagcctgaccccgggcttcacggtcggcatcctgcagcaggagccgccgctggacgacaccaagaccgtgggcgagaacatcaagatggcgttcggcccgattgccgagaaggtcgcccgattcaatgaaatcggtgaggagatggccaatccggacgccgacttcgacgccctgatggaagagatgggcaagctgcagaccgagatcgacgccgccgacggctgggacctcgactcccagctcgagcaggcaatggacgccctgcagtgcccggacccggacaccccggtcaacgtgtgctccggtggcgagcgccgccgtgtggccctgtgcaagctgctgcttgaggccccggacctgctgctgctcgacgagcccaccaaccacctggacgccgagtccatcctgtggctggaacagttcctgcaccagtacaagggcgcagtcatcgccgtcacccacgatcgttacttcatggacaatgtggccgaatggatttgcgaggtcgaccgcggccacctgtacccgtacaagggcaactactccacctacttggagaccaaggccaagcgtctggagatccagggagccaaggacgccaagctcgccaagcgactgaagaacgagctcgactgggtgcgctcctcccccaaggcccgtcaggccaagaacaaggcccgtctggagcgttacgaccagatggaaaacgaggcacgcaacaacaagaagctcgacttctccgagatccagatcccggccggcccgcgcctgggctccaccgtgctggaagccaaccacatccacaaggctttcggcgatcgcgtgctcatcgacgacctgtccttcacgctgccgcgcaacggcatcgtcggcgtgatcggcccgaacggcgtgggtaagtccacgctgttcaagaccatcgtgggcctggaaccgctgaccagcggtgaactgaagatcggcgacaccgtcaaaatcagctacgtggaccagaaccgtgaaggcctggacccgaacaagaacctgtgggaagccgtgtccggcggcctcgacttcatcgaggtggccggtgtggaggtgccgacccgcgcctacgtggccagcttcggcttcaagggcgccgaccagcagaagctgaccggcgtgctctccggtggtgagcgcaaccgtctgaacctggccctgaccctgaagcagggcggcaacctgctgctgctcgacgagcccaccaacgatctggacgtcgagaccttggaatccctcgaaaacgcgctgctcgaattccctggctgcgctgtggtgatttcccacgaccgttggttcctcgaccgcgtcgccacgcatatcctcgcgtgggaaggcgacgacgacaacccggccaagtggtactggttcgaaggcaacttccaggcctaccaggagaacaaggtgacacgcctcggcgaggatgcggcccgcccgcaccgcctgcacaagaagcttgtgcgcggctgagatacgccggcattagtgccacaacgcgctttatacgtcgaaagccgtccctcaggggcggctttccccataattgccccatggctgcccgccccgcatcccataaaatcccacagtcgcctacggcaacacaccggcagcgcagcagcaacgtagcggcaatgcgccgcataacccaccgtttaccttccaaacagtctcgttacatttcgctcccggaactcttaacccccaccggatagactgccaaccataggttggaatacgataaccgaatactgaacacagcagaacaagaatcgaggaacgccatggctcaggcaaccaccgtaactccattggaccatctggtgaaggtgctgaagttgggcgagccttccgcttaccgcaatcacacatatatcaatggcgagagtatgtacttccccaccggccgcgtctacggtggccaggtcatcgcccagtcggtgatcgccgcgtccaaaacagtgggcccttcacgcctgccgcattcggtacatggctatttcattgccgccggcgatattcgtcaagacctgttgtttgacgtcgagaaccttcgcgacggccgctcgttctccgctcgtcgggtcaacgtcacccaagccgaggggtcgattctcacggccatcgcctctttccaggagaccggccaggagggtgtggaatttgccgatccgatgccggaaaacctgcccgatcccgaaacgttgacttccgccaaggaactcatgcagccgttcgccgaaaagtcgccgttcgccaattactatgccgagaaatcgccgttcgatatccgccacgtgacgccgaccgtgatgctgcgcgcggacaaggattccgccgagcatgattccggcaagcagatggtgtggatgaaggccgatggccacgtcgatgtgccgcaggtcatgcatcgtgcgatgctggcactcggctgcgatcaggtgatgatggagccggtgctgcgccgcgccggactgtcgatttccacaccgggcatttcctatgcgtccatcgaccattcgatgtggtggtatcaggatatcgatatcaacgaatggcatttgtatgtgcaggatacgcctatcgccgcgcacgggcgcggactcggcatcgccaaagtgtatgcgcagaatggcgacttggtggcggccatcgctcaggaagctatggttcgcgtgccgcaggaatagtggtaatcggcttggccgatggtgtggttttttcttctctcccccagtcggctacgcctacggccccctcgtcagagggggcttatcacggattatcttttgtaggcttgggctatgtcgctacggcgcttggcttccttgattttcgggttttcggggccttcgttcggcggtaactggcacaaccattcgccgataatgccgatgatcatgtcggcgatgcacaccacggccgcgattgcgcactcggtgacggcgtgtgcatagaaatccgcctcgatatggctcaggctcatcacaatctgaccgccataccagccggcgagcgttgcgcccgccaatcccagtgcctttgccagcaccagcgtatacaccgcgatagtgggattgatgaagctatgcggacgcttcttggggtcggtattcgcgtatttatgcacttgcagggccaagatcagcacgataacgcccagcacggccagcaatccggtcacaatccaaggcgcaccaatcagcgacagtcccgagctttcgccgtaggaggccagaccgatacccgccaacaggcccagcacggcaccgatcacatactgccaccatggtgttcgccgtgttttcatgtccggcctccttatcgttgcgttgctgtttgctgtttgcgaacggccctcgcgcctgggctgttcatcttgatttggttttcgtcactgccgtgcccggctgttcgaggccggagactggtccgtcaccgtctggtttctagcctaccgttcgtaactggttctgccatcagctcaactgttcgacagtatccagttgtccgatagcaatccgacctgtccggcatccggtgccatggccaaaaggaaggccaccgggtcgccgcccagagaagcattcgggtccatatccagccaaggtgccaataccgacgcatggttacgggccgacggccaaggaatgctgcagttgggctcgtcggaagtcacgccttccatgtcgacaaggtcaaggtcgactgccagatcatgaacgctttcgatgctgcccaatacggcaatcaggtcggcgggcggcaacttggtttcgatttggatgaccgcgctcatcgcgtccgggccgtcgaaatggctgacatggtagagcggcgagatgccctgtacctgattgccaggaacactgtcgatggaaacgatggtttcgcggaacagccgttcggcatcctgcgaggtggaatccagcgaaataatcgccttgcgtgagacgggtgccgactccgacgctgatttttgcttgactgcatgcccgccgagcatccagtcttcgctctcgagctgcacggcgttacggtccggtgcggcggccagcaaatcggctacaggcccctcatgggctccggcgagtttggcgttcggattcaatgccaaccaaggagccagcacaaacgcacgctgccaagcacgcggatggggcaatgccagatccggatccgcgctggtgatgccatcaaagtcgataatgtccaagtccaacggcctggaatcccaatgattctcacgaattcgtccatggttcgcttcgatgttttgcaacgcggcaagcaattcgtggctgcccattgtggtttcaagctccaccacggcgttcaggaaatccggcgtaccgtcggccatgccccacgcggccgtgcggtaaagcggtgagataccggtcacctgtgtgccgagcagcgcgtcaatctcccgaacggcggctcgcaaggtggattccacctcgcccacattgccgcccaaggccaccaccgcgttatggatggcatgctcttcagcagtgcgtccattatcggtggcacgcacgcgcgagatggagaccgatacatctgcaaaagccacgacgatgggcgcatgaggcttgtgcacggtgacgtcgatggaggcgacggccggcgcatcggcaaggatcttatccgcgatacgttgggccagacgctcgatcaggtccacatgagggccttcgatgacagccgtgatgtccttggccacgcggccgtaatcgatggtgtcgttgagatcgtcggattgaccggcggcggccagatcaaggtgcagggtgacgtccacgacgaaggtttgtggccgttcgtgttcaaaggcgagcacaccgtgggtgccgttggcatgtacgccggtaagagtgatggtgtccattggtaaggctttctgttcaaatgctccccctcagtcgccttcggcgccagctcccctcgcccgaggggagccaagacctagaagcaaccaaaaacagggagccaggggaatcatgcgtattcgcgccaggtgttgccggcgatgacggcggcgcggcttttggccacatcgtgtacgcgcacggcccatgcgccgtgctcggcggacagggcggacaaggctgcggtcacgtcatcgcgctgggccatggtcgggccatcagcaccggcagtacccgccccggtaagcatcgccgaaatgaagcgcttgcgggactggccaatcagcaccggatatccagtggcgcggaaggtctcgagcccggtcagcagcggtaggttatgctcgatgccgggcttggagaagcccagaccaggatcgatgataatgcgctcaggctttacgccggcggccagcacgccgtcgacttggcgcatgagttcgtcgtgcacgtcggtcaatacgccatgctcgtatacggaggtgtcttgatcggggttcgcgcccttggagccgacgagccagccgcgccaatgctgcacgatgtacaggcagtcgtggtcggcgaccacatgcggcagctcggcgtccagcgtgccgccggaaacatcgttgatgatctgtgcgccctcgctcagcgcggcggcggccacggatgcgcgcgtggtgtcgatggacagtacggcaccggccggaatcaacgtcttgacggcaccggtgatacgggccagttcgtcggcctcggacacgcgcttggcaccggggcgcgtggattcggcgccgatgtcgatgatatccgcgccggcggccatcatgtcgcgcccgtgctggaccgccttggccgggtccagccacaggccgccgtccgaggacgagtcctcggtgatgttgagcacacccatcaccatggtgtgcgtggcgtcatgcaacgcctgcaaatcagtcataggtcatctccccttcgttgtttccccttcgctcccctcagtcacctacggcgacagctcccctcagagaggggagcctaggttgcgtcacttgtcaagaatcaagctcatggcttcggctcgggtggcggggttgcgtagcagaccgcgcaccgcagaggtcaccgtgcgggcggaagacttcttgatgccgcgcatcgacatgcacaggtgctcgcattcggtcaccacaatcacaccacgtgcgcccgcatactcgaccagcgcgtcggcgatctgctgggtcaaacgctcctgcacctgcggccggcgagcatacacctcaaccagtcgggcgagcttgctcagccccatcaccccgtccttggcgggaatatagcccacatgggccacgccgtggaacggcagcaggtgatgctcgcacaccgaatacagttcgatgtccttgaccagcaccagctcgtcggtatccacgtcgaagtgcttctccagcacatcggccggcgaggcctgcagaccggcgaacagctcgcggcacgcgcgggcgatacggtcaggcgtttccaccagtccctcgcgcccgggatcctcgccaatcgacttcaggaacagacgtacggcctcgcgcacgccttcctcgtcgtatgtgcgtttctcctgctggcaagactctatatattcgttcatctcatctctcccttgtcattgtccacaacgacgtcggtccggcctgcgtacgtgagaaaccacatgaacaggtcgggccgaatcgtcatcgtgtctactcttccggcttcatgccgaccgagcgcttgaggctttcgggaatctccaccggcggcttgtccgagtcggggcggcggtcgttggacagccacaccggacgaaccggagccttcttgatcggcgcgaagatctccgcaagttccttctcgttcagggtctccttgaccagcagctggcggaccagctcgtcaagaatctcgcggttgtcgttgatgatggtccatgcctcggtgtgcgcggtctccaccagcttcaacacttcgtcatcgattacctcagcggtacgatcggagtacttgcgcggctgcagaccatccatcacagtggtctgatcgtcgtcggaaccccacttgatggcgccgagcttatcggagaagccgtattcgatcaccatcgtacgggcgatgctcgtagccttctcgatatcgttcgaagcaccggtagtcgggtcgtggaagacgatttcctcggcggtgcggccacccatcgcgtaggccatctggtcgagcagctggttgcgcgactgcgagtagcggtcggaggtcggcatgacggcggtgtagccgagggcgcggcctcgcggcagaatcgtcaccttggtcaccggatcggtgttgttcaaggcggcggccaccagcgcatggccaccctcgtggtatgcggtgttgcgcagctcttccagagccatgcccttagacttgcgcttcgggccggcctgaacgcggtcgatggcctcgtcgatggcgcggttgtcgatcaactgggcaccggcacgggcgcacagcaacgcggcttcgttgagcacgttggccaaatcggcaccggtgaagcccggcgtgcgcacggcgaccatatgcaggtcgacgtccggtacgaacggcttgcccttggcgtgcaccctcagaattgcctcacggccttccagatcaggcgcggccacacctacctgacggtcgaatcgacccggacgcagcagagcggggtcaagcacgtcagggcggttggtggcggcgatgatgatgaggttggtgtcgttgtcgaaaccgtccatctcgacgagcagctggttcagcgtctgctcgcgctcgtcgtggccaccgcccataccggagccacgcttgcgacccacggcatcgatctcatcgatgaagatgatggcgggagcgttcttcttggcctcatcgaacaggtcacgcacacgggaggcaccgagaccgacgaacatctcgacgaagtcggagccggccatcgagtagaacggcacgccggcctcacctgcgatggctcgggccagcaacgtcttacccgtgccgggagggccgtacagcagcacgccgcgcgggatgcgcgcacccagcgccttgtacttggacggatccttgaggaagtccttgatttcctcgacttcggccacggcctcgtcttcaccggccacatcggcgaacttggtggtgggggtctggccctcgagcagcttgccgctgttcttcttgccgcccatgccgagcatgccgccggcaccgcccatgcggctcatcagccaccagaacaaggcaaggatgatgacgaacggcagaatcgaggtgatgaggtagctcatcacactggtctgctcgatattcgaggtccagcccttttcgagatcgccgttctccacggccttggccacctgtgcgccctgggcgaaggtgtagtagaactgcacgttcttgccgtagttggtcaccttgccggtgtcggcgttcttcttggtgtagtcattcttaagctcaaggcggacgacctgcttgttgtccgtgatctcggcgtatgtggccttgccctgattgatcagcgcgaaaccatctttagtatcgatggttttggtgccaccgccggcgaacatctggaacatcagcacaaccatgaccacgagcacggcaccccacagccagggggactgccatatcgggcggttctctttgttgcctttgccattgttcccgttattgccacggttgaacgggttggtgaacgggttgccgttgttacggttgttgttcgggttcgggttattgccgttacccggcccttgcgggaagctcatgcttgcactccttggtagacggacggcttgaggaccgcgatcgaatcgaggttgcggtagcgttcgtcaaagtcgaggccgaagccgacgacgaactcgtccggaatctcatagccggcgtacttcacatcaacgtccacctctcggcgggaaggcttgctcagcaaagcgaagacttccacggaagcggcaccacgacgtttcagttctgcgaccagccacgcgagcgtgcgtcctgaatcaacaatatcctccacaatcaaaatgtgccgtccgcgaacatcggcggacaaatcctgcctgactgtgacctcaccgctcgacactgtgcccgagccatagctcgacaggctcatgaagtcgatctgtacaggaatgctcatggcctgggtgaacgcgaccagcgtattcacggcccctttcagcaccgcaacgagcagcggattcttatcgcggtaatcctcgctcgcgagagcagccatcgcgtggatcttggcatcaatctgttctttgctgaccagctcgtggtcaatatcttcctcaacgtcagcgattcgcatgcgctccatcttggcacacgcgaatgacgtgtttcttgcgattggctgaataacctctgggaagtgagacgccgccttgcccatgccaatcgacgaccagccggtcgatggcggcaatctgggcggcactggcgttcacaccggcttggctcagcgcgtgagcgatgacccgcaaccgaatcgcctctggctcacgtgcaatacgtttgacgctgatcatcaggccgatgccatggctcgaatcgttggtatcgcctgccgcgcaggctcgtggcgcatcggtcgataccactgccgacaatgccggccaatcaactgccgcaaccgcctcccccatcacctcgtcggatcgctgatccagatactccttatccattctggccaaccgtgcgctttcggcgaaatggcgggtgacattgaatccagcgaatcgttcgatggccggcagcaggtcgtgacgcacccgcgagcgcaacggatagtcgttcggcaactcgccgtctaccgcatcgccattggtggggtcatcccaatattccacacctaagtcttcacagatgccggtggtttcggctcgagtaagggtaagcagtggccgcgcaaaagtcgcgccactgcgtgtgaagacctgcggcatgccagccaacgcatccacgcctcgactgcgcagcaggccaatcaatacggtttccgcctgatcgtccatagtgtgggccaacagcacggcaatggcacccgattcatgcgccgcggcgcacagctcgtcataccgggcctgccgtgcggccgcttcgaggccctcgccgcgcgcctgtacggttgcgttgcgcacgatgaccgggcccagtcccaacgcgcggcaacgatccgcggcctcgctggcgacctgttcggagcctgcctgcaagccgtgatccacaatcacggcaccgcaacgcacacccatggacgtgcatacgatatggctcaccgcagccagtgccatcgaatcgcgcccgcctgaacaggccacgagcacgagcggcgcatcggcggcaacggcatggtccccatgctgcgcgaattcgggagcctgcacatcgcatagttccacggcactcagcgttgcgcggaccgcgcctacggccttgcgcaatcgtgcggaatatgccatgtactcaccacctttttctggttataggcactcgtgcgtttatggacgtttacggcctttgtagcccttgatgcctcttttacagtcccgcgagcttggtgataaacgagtcgatggcgctacgcgcggcggcataatcctcaggattgttgaccaccacggcaaacgacaacgctcccccattggtgcgggacacattgccggccatcgacgtaaccgtgccaaggctgccggttttgacgcgcagcagaccagccacggcatcatccgtataccgatcctgcgccgtgcccaccaatcccgcgatggatagaccttccgcaccagcagcaccgctctcggtggtcagattacgttgttggacggccgccagcgtgcgtacggcgagccgggagccgggagacaggccggagcaatcggccatggtcagaccggatgtgtcgagaccgagatcgttcagagtggatttgaccgcttccgtgccgccttcaggactgtttgtcgctgatttcgccaaggcggtgagtctgccgaactcctcggccagcgtattgtccgaatgccgcaacgtgtatgccatgatttcggacagtgttgccgaactcaccgaagccaaaggcgtttcgccggatggagcggtgtttgccgtcacgtctccggtaacggccacgccgttcgattggagcagttcggcgaatttcgtggccacgtcgctggaggcgtgctgggacagttccgggtatccggccgaatcatcggggtcggccggcgcaggcgtatcggcggtgtattggcggcctccatcaatcgccattgatgagaccggcgtgaagtagacggtgtagtcgcttaagactgcgccgccttccgacagacctgccggaatgcgtgagtcgccgaatagggtgtcgtcgtactcgagattgacggaagtgatgcctcgctgggcgagcgcggccacggtggccttggccaaggtgttcagaccggcacgtccgttggtatggttggcgtcagaatcgcctgcagacagcagcatgtcgccattgcctttgagggtcaacgtattggtgccgtcatcggattgggtgaggaacacttgggtatccaaggtggatgccatattcagggtggatgaggcggcaagcgcggtcagcgttttcagtgtggatgcaggctcgcgtggagtgttcgactcgtgttcggcagcgacggtgccttgggcgtcttcaatgatcaccgacgtatcgtttcccacgccttgcgcggacagcaattcgttgaccagcgcagaagcggccgtggaatcaatggccttgttcgtgttcaaggtgccggcgacggtgccgcctgatttggcggtggctggatcggcaaaaacaggtgcggcgacgggcttcaacgtcaataatccgggggccacgtcggtgatgtcggcggcgcagtaccccgcgaacagggcgatggtggtcagtgcggaaatgatgacggtcagtgttcggcgatgcgatcgttgggtccgccgttgcgcttcacgccgctgacggcgtgataccgctgtagataccatcgtgctccttatgccaaggcgatcatttctgcaatgaggcgaacgagtcgagtgttgccacaatcgaaagcattcgcgcatccatcagcttaccgcccagccatgtcccgagtgccaggatgccgatgccgttggccagtgcgaccggaataatcgccagccatatgctgccttcggctcccgtcagcagcatgaccagcgccacgatgccggtgggcagcatcagcagcaggctgccaagcacgtagacgaacgggaagaagccttgggccatggcgcggccttgaggcgcggagaacggcttgtccattgaggcgaccggatacatcagcacacaggacgtgacttcggccacgcccaggccgctcaaggcgacgcccatgcccacggcgaggaagatcaggccggtgacgaggtcatcgggctgcgcccagcggccggtcagtgcgccgaccagcacgatgccggcgagatagagcagcaccatgtagacgaccatgatgccgacgtagacgcgcacgcggccgattctgtcggtccggccacgcacgccggcgatgacttccatggtgaagccgcggccgtcatatgcgagcccgttgctttccaccactgacatgaaccagccacaccagatcagcgactgccagacgaccgcgctgatgccgtgtgcctggaaggcgaagatgatcaggaacaggaccggcatggcgaaggtcatggcttggcgggggtctcgtttgagataggtgatcaggcgtgcggacaccgcgccggatgccgaatcgggcatccatgcgaatgcgccgatgcctttggcggtctcggacggactgtttgcgccgatggtgagccgttcatgcctcagacaccaagtgcatacggcgaagcagacgatccatgtgacggcaaggatggcgatgcgggcgatcagcaccgcccaagctccggtaagcgcgtcgaacggcagttggaaggccgcaccgaacggcgtccatgcggcgatagcggtcgccgcgccccaggtctcggtgttgaggctgaaggctatgccggagttgaccagaatgttcggcaactggcagatgatgacgaaagtcagcacgatgaagatgtagaacgcgcctttgccgcgtttgctggtcaccagcgtggtggatagggcgatgaccagtttggagatgctcatcatggtgatgacggccagcactgcggcgaggagggaactgatgattacggctggtcccatatgccgataggccagtgtccagagcatcagtgaggccacgccagtaagggcggggatgccggacaggccggaaagcagcaagccgaattgcaggttgcggtcggcgatgccgtagagcgcgaatttgcgtgggttcatggtggagccttcgccaagcatcatgagctggatgaagccgatgaagatggtcatggtcgcgccgaccagcacgacgactatgttgacgatgcctccgggaccaaggatgttcagcggaaagccatccgcgttcacggtgaagggcggcagtatgccgatgaaccatgcgagcacgccggtgccgatgatggtgccggccgcgagtacagcggaaaagacataggcgacggtctgccacgccgattttcgcagggtggcgagcgtgagcgtccagcgcaggcggaccagggtgatggcggtcttaatcattggcgggcctcatcggtgggtgtggcgggcgtaggcagaatcggctgaatcggctgggccgaagttggtgcttgggcttgggcctgcccgccatcgagccacgcgagatgggcggcttcgtggcggccaccgactagttgcaggaagcggtcttcgagttcttcgccagcagcgacctcgtccaccgtgccggccgcgcataccagaccgttgttgattacggccacatgcgtacacatcttttcgaccaatgccatcacgtgtgaggagatgatcaccgtgccgccagtcttcgcgtattcgatgagaatgtctttgaggttggcgctggacaccgggtccacggattcaaacggctcatccaagaccagaatgcgcgggctgtgaatcatcgcggaggccaggcagatcttcttggtcatgccggccgagtaatcggtgaccatcgtgttggcggccccggccaagtcgaaagcatcgagcaggtcctgggcgcgacgcgtggtctcctcgcggctcatgccgcgcagcatgccggagtagacgagcaattgcaaaccggtcagtcggtcgaagatctggtcgggctggggcatgacgccgatcatgcgcttggccgtattcacgtcgctccacacgtcatggcccagaatcatggcggtgccggcgtccggcaccaatagaccggtcaccatattgagcgtggtggttttgccggcgccgttagggcccaccagtccgtagaacgagccgattggaatgtcaagcgcgagcccgttgacggcgatcttccggtcgaagtgcttgaacaggccgcgaatggacaccgccgcattcgggttcggcggccatgcttgcggctgtggctgttgcgactgcgaagacgcgggagcggcggctggcatcatcggcggctgaaatccgacattcctttgagtattgtctaagctcatgcatctactctagcccaccagtcaaccctcagcgcagcacccccggattactgttggattgccccgctgagcagctccggactagcggactcggtcagcccttatgcgcgatgggcttccactgggctttggcgaagatggcctggaaggaaatcggcacgtagctgagcatgtaaatcgggaagctgagcacataggcgagcagctccttgttcgtggcaccgatctggtcgtgctcgacaatgatggtcaatgcagccaatgccatcaggcccaacaccgatgtgatgatgccgctggaccaaccggccagcgattgcagctggctcgaccaactcacgaagccacacgcggcgaacagcaagcccatcaccgcgcgaatcacgcccaacacggtaaacggacacagcatcaaggtgaagtcgatgcaggagaaatcacgttcgcgaaccgcgcgtttcagcaatgccgagccataataacggaatacctgcaggaatcccttgctccaacgcaaacgctgacgccaactttgcgagaaggtaaccggctgctcgtcgtagaggatcgcagtaccgcaatagccgatgcggtcgccatgcagaatcgaatccatagtgaattcaagatcttcagtgagcaggtggaacttccatcccttgttccgcttcatcacctcgcgggagaacatgaatcccgtaccgcccacatggcaagaggaaccgagaatcatacgcgagttagacaggaatcgcgattcacggatgaaccacagcgcagaaccagaagacacccagttatccgccagattcaccgaattacggtagctggtcagaatcttgaatccggagcagaacgccttgttcatttcctcgaagtaatgcttgtccagcttgttatcggcatcgaacacgaagtaggcctcataatcatcggccacaccgatgtcgagcatatgccccaacagatacgtcagcgcatatcccttgccaaccagttcaagattgtggcgttccaccacatggcagcccaaagaccgcaccacgtcggcggtgttgtcggtgcagttgtcggccaccagccagatgtcgatgaggtcggacgggtaggtctgatcgcgaatcgacccaataaggttgccgatcacgttttcttcgttgcgcgcggagatcagtacggcataccggttggtcatcggggcgtcggggaagcgcacgggcttggcgaacagggacatcacgatgcacagtccctgatatatcatgccggcaccaccgacgattaccagaagaatatcgagtacggaaagcagggtcatcagcgccaccccgccctaggattgctggaggcagattgatcagactgcttggtttgcttgcgttgcttgggctgctcagactgctgcgtatccgcggcaccacgctgcggaatcgccacggtggcggaatcgtccaaatcggattctttcgtctcgtgtggcggaatcgcatagatctgttcctgcagcaaacgcagttcctcattcatcggcacacggctggtggaccccttggccgcacgcggcatgtgctcgccgatcggctgcagcacatgctcgccgaacgcttcggacgcctcgacgatcttggacttcttctccggagtcggatcgttcatcagtggtgagtcaatcagctcatagcgcttggtgtacgcacggaagatggcctgcagcgatgcggtgaccggcagcgccaggaacgcgccaaacgcgccgaacagcgagccgaacgccagcaccgcgaggaaggcgacggccgcgttgatatccatcgtgcgctgcgaaatcctcggcgagagaatcaggttctcgatctgctggtagacgatgatgaacaccagcaccgccacggcgtacgtccatccgcggttgccccaagcgaacagcaccggcagcgcgccgccgatataggtgccgaccgtggggatgaactgggacaccacgccgcagaacagggccaacggcagccagtagggcacatgcagaatctctaagaagatggcagtgcaggtggcgttgatcaacgccagaatcgaacgggagaacaggaaggacgaaatctggccttgggccacggtccacaccagcaggaatcggcgctgcgtgttgggggccagccactggcagaaggagcggcgcagtttggggccggcggcggagatgtaatacgtggtcatgaccacggtcatgaggttcagcaggaaggagaacaggccgcccaccgtactcatggcggtaccggcaaaatcggtgacccacgaggtctggatattgttgaagatttccatgccgagattgctgatttccggcatcttgaacgtggcatactggtccacgaactcacgaatctgctcatacatggccggcaaaccgcggaccatggcaatcatctgctgtacgaacatgttgccaaatagcgtgagcagcacacccacgaccacggccacgcccaccaagctgacggcggaagccacgccacgcttccagccatgagccaccagcgccaccaccagcggttcgacggccagcgccaggaacagcgagatgatgatgtcgagcaccagataggagatgtcgccccacgagcgccagcagaacatgaatacgatgacggcgagggccacatacagcagcgcgcggccgaaccattccggtggcctgcgggaatctcccttggcggggaacaaagtaccaaagtcgatacgattctcgtcgtccgggtctgccccggcctctgcggcaccggttctcgacgtgtcggtgctgtttacgtttcgcacgcgttcgctcatggctccccattgtagcgaggggtttgaagctcggatacgccggcggcgtacacccgcttttctattgttgatgttatgctcaacgtttcgatcatcatcccagcgtggaacgaagccgaacgcatccgcgactgcctgctgaacgccacccgtcagaccatcatgccgcatgaggtgctggtggtggacaatcgttctacggacaacacctgtgcggttgtcgaacagttcattgccgaacatcccgaggccccggtcaaactgttgcaccagaacgatgaacaggggctgattcccacccgcaactttggcctgaacgccgcgaccggcgatgtgctgggccgttttgacgccgactgtatgatccggcctgactgggtggaggtggtctccggcatcttcaccgaagacccggccgcgatggctgccactggtccggtgatgtattacgacatgccctcacgccattttgggttgaaaggcgacaattccttacgcaagcgaatctaccgcgccgatggcggccagccgctgctgttcggctcgaatatggccttgcgcgcttcggcctggtatcagatcgcgaatgaggtctgccgggataaggccgatgtgatgcatgaggatatcgatatttccctgcatctgatgggcaaggatctgaaaaccgtgtactcgccgcgcatgatcgccgcgatgagcgcgcgacggatggatacgtcgttgagttcgttcctgaactacatgcgacgttttaagaatacgtttgatgcgcatccgcaacatacgcgcacgcataagccggaggtgttgttcaccgccatgtatccggcgatgcatatgttctacccggtgtggcagaaagtgctgaattccgcggatatcaatccggctgaagccgcgtggatcaacgagcagatggaactggcggaggcgcaaggcaagcagctgtacgacgagacccccaccgacgaagtctacgacgaaaagcacgaaaagtagctcgatatacaagccctctctgcttatgcaagctccctctgataagggagctgtcgaacgaagtgagactgaggaagagactgcgacgcagtcgctaaaacattgaatcggacgcaggccgatacctattattcagcggctacgccgcaacttctctccctcagtcagctacgctgacagctccctcatcagagggagctaatgtttactgtcatcgactgatcacatcagcgacttgtaaatcgcgaggatgtcctcttcggttgcctgacgcgggttgccgggggtgcacacgtcgtggaacgcgtcgtgagccagcggctcaaggtcggcctcggtggcgcccacttcggaaatcgtggtcgggttcttcagatccacggtcagcttgtggacggcctgcacggcctcttcgcgcaccttctccaggtcgccggtgtaggcgtcctcaacaccgaacgcatcggcgatgtcgcggtacttctcaccggtgaagtccttgttgtattccatgaccggggccagcagaataccgttggccacaccgtgggccacgcccagacggccgcccagcgggtgagccatgccgtgcaccagaccgaggcccacgttggagtaggccataccggtgatgtaggaggcgtaggccatctgctcgccggccggaatgtcgccgtcggcggacttggccaggttcttggcaatcatgcggatggtctgcatggacaggcagtcggacaggctccaggcacccggggtaatgtaaccctcgatggcgtgggtcagggcgtcaagtccggtggcgaccttcaggccgcgcggcatggagtcggtcagatccgggtccacgaaggcgacgatcgggatgtcgtgcgggtcgacggccacgaacttacgcttgttggcggtatcggtgaccacgtagttgatggtcgtctcggaagcggtaccggcggtggtcggcacgccgaagatcgggacggacgggttcttggtatccgcgacgccttccagggacagcacgtcggcgaactccgggttggcggtgatgatgccgatgcccttgcaggtgtcttgcggggagccgccgcccaggccaatcaggaagtccgcaccggactcggcgaacttggcgacgccgtccttgatgcactctaccggcgggttcggcttgacgttggagaacacttcgtagggcaggccggcctcatccagaaccttggtgaccttctcggcggtgccggtctccagcagtaccggatcagtgacgataaatgccttggtgaagccgtgctgcttggcgacggccggaatctccttgatcgcgccacgtccgaagtatgcagtctggttgaaaatcatgcggtacaccataggggctctccttttgagctagtgtcttaactggtggtccactctgtctttgagtggtccaacggttccccagtctactccgcgcatgagcattcacctgaaaacacgctgaaagaacaacactgaaaataatggcaagaaatggcggaattccgcacttgtcgaattattgtccattgaccaaaccagttccatcgcccgaaatctcaacgataagaccagtttccggagtcatctgacgctctccgagaaactcgtctctcatccgcttacttcgcgcgtagcgcaatcaatatgcgagatgcctaattccattcgtgcttcatcagccgaacgcgaactggttcgccagatggtgtattcaacggtttcagtctcctgaagaggactaagatatctcgatagttggggtgatcatcataagagaatgaggtagctaatggcaaatggcaaggctatgacggtcggcgagatggcatccctgtttctcgaccccgacactcccgttcgtatcgacgctttcgacggctcgcatttcggcccggcagacgcggatttgaaggtcaaaatcgccacgccgaactgcatgtaccagctgctcgcgcacccgaatgaaatcggcatcgtgcgcgcatacattctgggcgatttcgacgtggacggcattgactacgccgacccgtatccggtgatgcgcaagctggtgtcgctggccaaatacgttcgcccgctcgctcccgcatccattgcccgcgtatctgccggcattctgagtcacggcttcaagaagccgccggtgcccgccaccgagggcccgagcaagttcgcccgtatcaagcgtggcctgatgccgcacaccgaaaaggccgattcggaaaccgtcagcttccactacgacatgtccaacgagttctacgccgacttcctcggcccctccatgacgtacacctgcgcggtattcgacaacgagcacatgagtcttgaagacgcacaggccaacaaactgcgcctgattctcgacaaactggacttgcagcccggccagcgcttactggacatcggctgtggctggggttcgatggtcatcaccgccgcccgtcgcggcatcaaggcgctcggcgtcaccctttccaaggaacaggccgcgtacgccaacgaatggatcgcccgtgaagggctgcaggatctggccgaagtgcgtgtgcaggactaccgcgaggtgcctgagcacgacttcgacggtatctgctcgatcggcatgatggagcacgtaggcgtcaagaactaccagagctacttcgaagagatgttccgtctcctgaagccgatgggccgactgctgaaccaccagatcaccatcagccatgacaagcctcacggcaagcccggcaccgacgaattcctcgaccgttacatcttcccggacggcgacctcggcgcgcccggcttcatcgaatcgtgcatccatgacgccggcttcaacgtggtgcatcaggagaacctgcgccagcactatgcgctcaccctgcatcactggaaccagaacctctccgagcattgggacgacgcggtcaagcaggtcggctttgaacgcgccaaggtatggggtatgtacatggccgcctgcgctctgaacttcgagctcgacggcatccagatccaccagttcttggccgtcaagccggatcgcgtgggccacccggacggcaagtggtatcccctgcgccaatggtggcaggcctgattcctttttgtgggacggcacgtcaaaaatcggcaaaatcacgtgccgtcccacacgattctctttgcgcgcgcatttcgcgggtgctttttctgcaatactgactctacgagcgccacagccccagacacggctggggcggacgatcgcaccgaccatgacacgcgcggataagacccacgtttctttatttacttaacctgatgttcgcattggtgctgttggcgtgcgtagttgcggcaaggaagacagttgttggcgaacgcgagcctttgcattgaccggccagcccgccattttggcctataacccccgccggagtaggtacgcgacggatatgcaaaagccccgcacaaggcggggcttcattatggtggctccgaacggcgtcgatccgttgacctagcgattttcagtcgctcgctctaccaactgagctacagagccatgaacagtcaaaaacccggataatccgggcttcataaccattccagcgaccccggccggacttgaaccggtgacctccgccgtgacagggcggcgctctaaccaactgagctacggggccattgttctcacttgcgtgaggcaacagatgtatatattactgaaattcgccagtcatgcaaacttcggcgtgttccgcataatttcaaggtttttgctatcaccagcacgcgaacacgtctgtcacaaacatccacaaaacgacgaagggcgcgaccggaaccccggccacgcccttatggacggaaacgcttcgcggcatccaccgcaaagtgaccgtcaatctcagtcagcctgcttccaggtgtcgacgtcgatgtggtgttcggggttggcctgccaggcattccacgcggacttgacgatgtcttccacgtcgtacttggcatgccagcccatctcctcgttgatgcgcttcggggagccgatcaggtgcggcgggtcgccggcgcggcgggccatgacagcctcggtgaacggcagaccggtgaccttcttgacttcgtcgacgatctggcgcacggaggtgccttcgccggtgccgacgttgaaggcgtcgtacttgcgctcgtcacggtcgaggtacttgagggcggcgatgtgggcgtcggccaagtcggagacgtggatgtagtcgcgcacgcaggtgccgtccggagtcgggtagtcgtcgccgaagatggcgggagccttgccctgcttgaggcgattgaacagcatcgggatgaggttcaggatggccggatcctcaagctccaccggaccgcagccggccacgttgaagtagcgcagcgcgcagaagcggatgccgaacggctgctcgcaggcgcgtgccatccactcgccgaacagcttggtctggccgtaggggttgatcggcagcatcgggacgatgtcctcaggcaccacatcgaccggcggcacaccataggtggcggcggaagaggagaagacgagcttcttggcgttcttggactgggtcatgccggtgagcacgttgagcatgccgttgatgttctgctggtagtaccacagcggcttctccacggattcgccgacctgcttgcgagcggcaaagtggatcacggagtcgacgccttcggcatcgaggatttcggccaaacgctcaccggcgcccggggcggcgatatccatgccgtacaggcgggagccttcgatgcgagtgggcttgccgtagctcagatcgtcgacgacaacgaccttttcgccggcctgatggagtgcgtgaacgacatgagcgccgatgtagccgcagccgccggtgacgagaactgtcatagttgacctttccttgtgcgggttgcaagtgtcggccgtggggagttcagcggctgttcacttttggtccgctttgttaccttttgaaacaatttgagtatatcacacgaacataatcgcacaaaacggtggtgtcgtccggcaatatctgcattcattaggtcgatttggcgttcattaggtaggtcggcccggagccggcccgcacggacaccgggtaaacggcttgatatggtggttggtatcgcacaccacctacctaatgaacgccaaatcgacctaatgaatgaacagcggtgcggcgcacaaggaaaatccgaggaatatatgaccaatcccgaatccacagcaatcgatcccgtcgccgcgatgggcacagaccacaccgaggcaccggcgcaccccctgcacaaggtgctctccttcgtacgccgctccggacgtttggacgatcgcctgcagcgcgcatgggacaactatgccggcacatatctgttggatattgcggccggcaacctgctggacgtgcgcgaaggcgtcacgctcgaccgcgcgttcgtggagtccgcatggggcaacgataatccgctcattgtggaaatcggcaccggacagggagaaaacgtggtggcagcagccgcagcccacccggagacgaacttccttgctctagaggtctatgaccccggcgtggcccacacgctgctgctcgccggcaagcaggggctgaccaacattcgcgtggcccaggtcaatgcgcccgagctgttcaaggtgaccgcggccggcaccgtggccgaggtatggaccttcttccccgacccttggcccaagaagaagcaccacaagcgccgcatcgtgcagaaggccatggccggcgacattcatcgcgcgctggtcacagacggcgtctggcgtatcgccaccgacatcgaggactatgccctgcacgtgcacgaggtgatggacggcctcgatggctggaagaacctgggcagcgtaaccgtcagcctgccgctggagcacgtgggcaagggcaatgccgacatggccgccgatatgccgcacgccgacttcaccgaatccgagcgattcgagggccgcgtgctcaccaacttcgagaagaagggcctggccgccggccgcgtgattcatgacttcacctatcaggccgttaccctgaactgattgcgacacgccgaaatgccgtcgatttgcataaccgaacaacctcccgtaaagtaatttgagttgttcgcccccatcgtctaacggttaggacaccagactttcaatctgacaacgagagttcgactctctctgggggtacttcactaaagaccccggtcatagcgaccgaggtcttttcgtattcgcgggaccaggtctgaaagcattcggcccgcttgatatgtgctcatggtttcatctcagcacgtgttcgcgcccgccacaaggactatcccaccgtagacgatgtgacatcctccacactgtgacttcgcgcacagggtcccgacgccaccctcaccccgtttatcgacaccatgcgtgtataaccgcatatggcatcatcggcgaacatcggccggcagaccagttgcacaaggagaacatcatccacatggcagacaccgccaacaccaacaccaacgcctggctgccggcgctcaaagcggcgtttccgctgaccataccgatttgcctggggttcctgtttctcggcgcctcgtatggcattctcatgggcaccaaaggcttctccttcgtatggccgatgtgcatgagcgcgttcatcttcgccggttcaatggaattcgtcacggtgaatctgctgctctccgcgttcaacccgctcgccggctttctgctggccctgatggtcaacgcccgtcacctgttttatggactatccatgctcggcaaattcaaagggctcggctggaagcgcccatacctgattttcggtatgtgcgacgagacttttgccatcaactccaccgcgaaaatccccgccggcatcgaccgtggctggttctacttctgggttacgctgtgcaatcagctgtattgggtgaccggcgccacactgggcgggctgatcggcgcgcatctgccgttcaataccgacggtcttgatttcgtactgaccgcgctgtttctggtgatcttcctcgatcagtggctcgacggcaagcatcgcgagcgactgtccgccgtcatcggtgtgctgacatcactggcctgcctgctgatattcggggccaatgatttcatgattccctcgatgatcgccatgctgatactgttcgtcgcgctacgcccgcatctggacgtgttgcggccggccgccgacgccccggaagccacggcagaccatgccatgagccacgcagcggaccagcagaaggaaggacagacgcgatgacgatgaccatctggcaaggcgcaatcactatcgtgacggtggtgctgggcacgatgtgcacccgttttctgccgtttctggtgtttcccgagtccaagcagccgccgcgcatcatcgagtatttcggccaggtcctgccctatgcgatgaccggtctactggtggtatacgcactgcgcaacaccccgattctgaccggttcacacggccttccggaactcatcgcctgcaccgtcatcgtgctgctgcacgtatggaaacgcaatatgctgctttcaatcgccggcggcacaattgtatatatgttgctggtgcaactggtattctgaggcacccgactcgttagtctctccctccgcttcgctatgctcagcacctcccttacagagggaggtaatcttctgtaccttcctctgacgagggaggcggcaccgcgaagcggtgacggaggtagagacccgcagtcgtaagactgcgaaacacacagcatcggccacaggccgattcctacagctgcttcgccacccaatcgacgatgtacggggcgacttcctcaatctggtcgatggcgacctcgaactcgtgcttgccgccgtaccacgggtccaccagatcgatctgatcttcgcggccgggcttcggcttgggcagattcgggtcgaagctgcggtacatgtgcacttcggcgcgcttgccggccggcagcatgcgcagcagggcgcgcatgtgggaggcggtcatcggcaggaacaggtcggtacggtcgatttcctcacgcgagatgcggtgtgcgaagtggtcacgcggaatctcatcaccataaccacgttcgcgtagcacgcgcacggcacgcgggtcgatcgggtggctccactcctcgtcggacacaccgctggattccacgttcacctggtcgccaagaccgcgctcattaaagaagtgacgcagaatgatctcacccataggcgaacggcagatattgccggtgcagacggtcattacggtgtagggctgggtattgctcatagctttgaatcaatcctcaatcgggcttcaccgggccgcacacggcccgactgtattgttggggtcgaatgaatatgaatccggctcatgccgctataaagggcataagccggattcgcatgcttacttggttttggccaagatacggaaacgataggaatcgatgccggactcctccttggcgggcgtatgccactcgcccacttcggcttcccgccacatcccggcctcgaccagcgacgccatatcgggcgcgtagctgtcggcatccacggtggcggccagatcagtcacataggctttgtccgcgaacggcaaagcctcggcgaacaactgggcgccgccgaggatccaaatctccgaacggtccagaccgtcgtccggaatcgcctcctgacgggccatatcgagcgcgtcgtcaagactggtgaccacagtggcccccggcgcacggtacatcggatcgtgggaaacgacgatgttgtcgcggttgggcagcggccggtacttgccccccagcgattcccaggtcttacgacccataatcaccggatgggagacggtcagctccttgaaatgcttcatatcctcggcacagtgccaaggcatgccaccattgaggccgatggcaccggcgcgaccttccttgtcacgggcttcgccccagataagattcaccgagaaggtcttgggataatcgtcaccccagtcttcttcagtggcagacagcccggcagatccgggctcgggttcgtgatagccgctacggctactgtcatgctccatttcgcttactcctcctggattgcggaactgggccttagtgtagtggacagcgaagactcgggggccgtcaccttcacagtattcgctgtccacgaaacggtaatcagcatcagaccgcaacaggtgccttaatagtggggtgatgctggtagccgacgaccttgaagtcctcatactggtagtcgaacagggaatcggccttacggatctcgatggtcgggtacgggtagggcttgcggcccagctgctcaaggaactggtcgacgtggttgtcgtaaacatggcagtcgccgccggtccagacgaattcgcccggcttgagcccggcctgctgcgccatcatcatggtgagcagcgagtaggaggcgatattgaacggcacgccgaggaacatgtcgcaggaacgctggtacagctggcagcttagcttgccgtcggccacgtagaactggaagagcgcgtggcagggcggcaacgccatcttctccacctcggccggattccacgcggagacgatcatgcggcgcgaatccggatgatgcttgatgaggtcgagcacattggagatctggtcgatggtgcgattcgggtcctcgggggtcggcgcgggccaggaacgccactgcacgccatagaccgggcccagatcgccgttctcgtccgcccactcatcccaaatatgcacgttgtgctccagcagccagttgatgttggaggaacccttcaaaaaccacagcagctcataggccaggcctttgaagaacacggtcttggtggtcagcaacgggaagtacttcgacaggtcaaagcgcatctgctggccgaacagggaaatcgtgccggtgccggtgcgatcggacttcagcgtgccttcggtcaggatcttgcgcaccaggtcctcatagggcatcggaatgtccgtttcgggacgtgcggggatacgggagcgaatatctgcgagttgttcttcggtcaaagccatgtgcaccagtgtagcttaggggcataatagagaagtccactgatgcgggagagcggccaggtgccgcgctcccccgctggcatggcgatgggccagatcgccggcggctgaaaaaaaaggagcagctatgggtaagcgactgtgggttgagcgtaacaaggacggttcgtgggatgcgttcagcgacgatggcgcacacattaagttcggcaaggatcgtggccagttcacgccgggcgatctgatgaaggtcgcgctggccggttgcgccgcgctgtccagccagttcgccatcgaacatacgctgggtgagggcaagggtgccaagattgtggtggatggcacgtacgacccggaaaatgacgcctacaccggtttcgaggagcaggtggtgattgatgcttccgacgccggtctgtccgaggaggatgccgacaagctcaaggagcgcgtcacccgccatatcgacaagggttgcacggtcaagcacacctacgtgcaggagaccccggtgcgcatgaacgtcaccgtcaagcactgagacgggatataaattgaagaggctccctggcgggagcctctttccgtatattcggactttactggcgatcgggatcgatggtcttttcgatctgctgggcgacttcaggctcggctgcggacaccggaatctcctcgacgccggcaatctcctccagcgacttggtaggcacttcggcgggcgagctcggcacggtgtcgagacgcgattccgcggcctcaacatacttgcgtggcaccacgtacaccgggccgaccgcatgctgcagcaggccctggctggtggagcccagcagcaagccagtgaagccgccgcgaccacgggagccgacaacaaccacatcgtgatcgtagctggccttggtcagggcgctcacggccgggccggaaacgatctgcttgttgatcttcagatcaggatgcgattcctgcaacggcttgatgcgcacctcaagatcgtccttgtaggactccatgacggcgtcctcgccgtccacacccttcaggttcggcacagcggaaatcacgtccagttccgcaccccagcacgtggcgaagtcggcggcaatgtccagcgccttcagaccccacttggattcgtcggagccgacggccaccttggtgatcgtgttgttcaggtgcatcaggttaccgtcatcatcggtgtacggcaccaccacaatcgggcagtaagcatatgccggcagcgatgaggacgtagtgcccagcaggcgctcggccagaccgcccttgccacggttgccaatgacgatcagattgtagttacgagacaattcgacgaacaccgatgccggatctccggtaacaatcagtgtggcggcttcgacgccctgctcgtctgcgatggccttggccttggacagaatctcctgagcatcggaatgcgcggcgttatcgtcccccatcgccgtgtaagtggcatcgaacgaaacggcggcatagctcggcagggaatatgcgcagacaatctgcagcgtcagccccgcgtgctttgcataattcgcggcccaccatgttgccttgtaactggcatgcgacccgtcaacgccgacgagaatagccttgtcgttaatcatgacgacctccttgaagttattgcggcacgaataccgcgtatctcaacaataccccgcgacactcggtttggccggtatcctccgctcaaaaagaaatccgcgtatacgaaaaaggcacaccccaaaggacgtgccttaatacgaattcgcttaccgcataattcttgtcacatcacgcggcgaatggaatatccagctccaccgaatacggaaacgtcgcttactgccgttccctgcaccgggttcatagcattcatcacctgtccgttaccgatgtaaatggccgcatgagtaccattcgcaagaatgtcacccggcttggcatccgccaagcttgcgaccggagtacccacggtggcttgagcaccagaggtacgaggcagggagatgccaaactgggagaagacgtactgcacaaaaccggagcaatcccatcctgccggagtgttgccgccggcaacatacggatagccttggaacttcagtgagaagctagcaagctcagcgccagtgccagtgccagtcattttacccaagtcaacctgtggaatcgacgcacgctgttcagagcggctggctgccgcagcagcagcggactgggctgcagcagcttcatcagcggctttctgagccgccgccgctgcagcagcttccttctcgccctgagactcggtctgtggcacatcaagagtctcgatgccaccccatttagagttctcatcaaccgaggtggaggtggattcggcgaacaaattctttttcaccgaactcgccttcgggaaagaacgtgaggacaccacagcactcgtctgcgcggaatcggcagaggcaaacggggctacgcacgcaaacatggcacccgtggcgataatcgccactgatgtggaaataatagtcttaacgctcatcatcaacgccatacactagcacacatgggtcgatttcataacaggaatagcatttcgaagatgatgtcgcgggtgcatcattcggcaggagaacgcaacaggcctcggataccgatcggcatccgaggcctgcaataaatcaatcaataagactgcatcacgggatacgcaccacgatggtgagcttttcggtcatggcactagcgagagccacgctatggccattccatccaccatggaccgcctgaccgttgccgacatacaacgccacatgatcgtagtgtgcaccaccgttccatccaccggtgttggcataaatcagaatatcgcccggctgcagggatccgtctgtgactacgtggccaccaggaacattgacgtactcttcaggccaaccgtggaagttaatgccacgggccgccaacgcttgactgaccaatgcggtgcagtccatgctctgtccgatcaaagaatacgcacggtcgatagaggcaccggcaccagcggaaaccgaaccactggcatcggaataagtaacagaagagcgagactcattacggctcgcggcgttggcctgctcctgggtcgcctgagcctcgacctccgcctgcttctcggcctcctcttcggcagccttcttggccgctgcggcatccttttccgcctgagattccgtctgcggcacatcgaggttctcaatgccgccccaatcagcattgtcctcaacgctcgtggcagtggcttcagtcgtcagatctttgcgcacctgggtgtacgaggggaaggacttggtggaagtcacagtaacaccctcagctgcagttgctgtaggaacaaacataaacaagcaggcacaggagacaatcgcggcaacaatggaagaagctacagttttggtcttcatagaaccatcaccctacacggtgcgcattaactcgtacaggatggaagaaataaaacaccccggagctattgggatatatcggcgtgtcggcacaggtcagttcggactaatacgcggccgcaacacttgaaatgtcatttcgcgcgaacgattgccgatagggcgacgtcacatccgaacagtaatcaccgaatgtaagccaatgaaatgaatcagtagtgaacgtactggaacttaccggcttcggcggcgctgaacgtacgggtcgaaatcacacccaatcccttggcattggattcggagatctcaatggagccgtcggcattgatcttttccagaacggcaacatggccgtacgcgccatcggcatcggcctggccaggagcgaacaccacagcatcaccgacatggcgaggagtgttgtccacccaatagcccagagcggaagctgacgccgcccacgcgccaccattgccgaagttgccgctggaaggcaggcccagttcggcacgacgctggtacgcgtaccacgtgcactgaccccacggatagttgttggagttggtgccaacggcatggttcgggttgaagccagccggcacagcatcgccatcggcatccacgagagccgacaccacaggattgttcgcattattgcgattcatcagcttggcgtccaaggtgctgtctgaattgctcagcccccagccgccttcattggtggactgtgcggtaacggaggatgaactcaaatcagtacgcgcttcggaacgagaagccgcagtcacatcgctgatgcgcttaatctgcgtggtcgtcgtggccggatcagccacgaacgagttcgtggcgtcttcattgttggaaaacgcgagagcacctgcggccgtgccgaccagagcggccagtgaggccgaggcaagaatatggctacggcgttcagcggcacgagcggcctcacgaatggaacgacgggtctggggagcgatttcgttgatcttctcggcaatggccggatcaagccccaaaacaacggcgtcgctaccagcggattgcaccgcacgcacagcacgaacggaatgagaacccttgccggaggcaaacaatgccttcgctaagctgaacttctggcgcgagaccgtggtcgctttatgcgaagcatgcttcatactacgttaactccttggatgggttcggcggggtcatttcgatgacctcgtatgaccgtcacaattgagtactgtacaacgaacagaggtcaatcctcaatgtgatcccccaccatccgggtgtgtcaaacgatttacgtaaccgtgcggccgggtgaaaaaactgccttgtttccgcccgttcacgaacctcactatccggttatcggaagaatcactaactcatgtcattccgacacaccgtaaccatgatgtgctgcgtacattctgcactgcattccgcattgccaccactgccgcccggcaccccggaattccgcagtaaccccgcagtaatcccgcacaccgagcattatccgcgatattccccaacactggtctacccttgaaaccatgactatcacactgagtattcccgagtcgctgaagcccgaagatggtcgcttcggctccggccccagcaaaatccgccccgaacagatcgccgcgctcgacgccggcgccaccaccctgcttggcacatcacatcgccaggcaccagtcaagcaactggtcgcttcgattcgtgaaggtctgcgcgagttcttccacctgcctgaagggtatgaggtggcgcttggcaacggtggcgccagcgcgttctgggagattgcctgcgcttcgctgatcacccgtcgcgccgcattcggcacgtatggctcgttcagtgccaagttcgccgcgtccgccgcgaacgcacccttccttgaagacccggtgctgttccccggcgagccgggcacttaccgtctgcctgagctcaccgagggcgtggacacatattgctgggctcacaacgagacctccactggtgtggccgccccgattcgccgcgtggccggaagtcgtgaagctggtgccttgaccgtcatcgacggcaccagcgcagccggcgctttgcctgtggacatcagccagaccgacgtctactacttctcaccgcagaaggccttcggtgccgatggcggtctgtgggtcgccatcctctcccccgaagctatcgatcgtgcggcaggcgtcgaatcaagcgctcatctggaaggcgcacatcgctgggtgccgccgttcctctcgctgaccacggcactgaacaactcccgcaaggatcagaccctgaatacgcccgccgtggccaccctgatcatgatggaaaaccagattcgctggctcaacaacaacggcggcctcgcctgggccaccacacgttgcgccaagtccgcatccatcctgtactcgtgggccgagcgctccgaatacgccgctccgttcgtcgtcgatgcggacgcacgctcgaacgccgtggtcaccattgatctggacgagcgagtccaggcctctcaggtactgtccatcctgcgcgagaacggcattgtggacgccgccggctaccgcaagctgggccgcaaccagctgcgcgttggcgtgttcccctcggtggaaccggctgatgtcatggccttcaccaagtgcgtcgactatgtggtcgagcacctgtgatggcgtctatgcctcgcatggccgaccatatatgccatgcacattgatcggtctcgactgataccgattgaataaatcgtagggagaggtgtttgacgcccctccctactcttactacagtgcatgagtatgaagttcgcgcctctcattgaccctgccgtccgcaaacccgcgcccaagcccgtacgggtggatctgcgtaaggtgtttgccatcggtaccggtctatggattgtggcgttgattgtcgtgctgattctgctggccgtgggctacagcgtaatgccgttggtgattatgtgcgtggccggcgtcattattggcttgctactgctggtctgggaatacttcgaccgctgggactaccgccgcctcggacagtaacgcaacacaagctccctctgatgacgggagctgtcagcgtagctgattgagggagagactgcggccgcaggtcgctcatcaaacagcattggtggcatgcaaggcatgccaccaattccttacctcactgcgccaacggcaacgtaaggctgaacgtactgccttgcccgggcgcgctccatacggtcacatcgccatgatgggtcagcgccacatgcttgacgatggccaagcctaggcccacgccatccgccgtgcgattgctctgttccacgccccggtagaaccgctcgaagatgcgcgcctggtccttcttagcgatgcccgtgccttggtcaatcacgcgaatcaccgcgcggtcgccatccttgtctttggatgcggacacgctgaccacgccattttccttggaatagccgatggcgttttcgatgagcttggtcacggcgctgtcgatctggtccgcctcaccattgatgactagatcatcgtcgcccttgatgttcagctgcacgccagcctcggctgcctgcggctccagtcgcgccgccgtggccctgagctgttccataacgttcagtcggttggcggaagacggcgtaatcggctcctgcgcgcgtatgagcagcagcaaatcagacaccatgtggttgagcttgctgcagctggaacgcacctggcgagcgtcggcagccacctgctgttcgtccagattgccggactccagcgaatcggcgagtttggccagagcctcagtggggcccaacaattgctcggacacattggtaataaacgagtcacgcacttgagcgaaacgaatcacatcactgacatcggtaatcaacacgatgacgaactgctcgttgatacgccctacagtcaccttcagccagttggggcggtggacggactgcgtggcgacgtgatcgcccttgttctggtctgcgacgtaccgctccggagtatcggtggtcaagtcgaactggcgcttgccaccggacttgcgcgcctcgtgaatggcatccagcacatgctgctgggcaatggcgtcatctgacaccacacccaggcggtaggcggcgggattgcagcggaccacctcgtcgtgctcgtcgaccaccacggacgcacctggcagcatggacagcagcgtggcggtgtcgtcggacagatcgtcattgtcgtcatcatcggccagcggcgattccatggacactcgatgtgtcgcaaatcccacgatgagcgtgatgattcctaccacaaataaaacagccgtgacaataagagcaatcgcggcgacgagcggcatctgtgtcatgcccccattctttcacaccacacgccgggattgcggtttgccggcacgccggtaacatgaatttcaggtgaacaacccaatgaacagtagaacaacttgaggttgccattacctacgttgaagtggggaacaagtactggaataatacactggtacaggttgcaataagcaagcatgaaaggctagagaaatgcgcgttattttcaacgaggagctgaagcaggttgctgacgacctcgaccgtatggcgcagaacgtacgcaaggcgatcaaaggagctggggaagccctgctgaatcaggacgttgaagccgcacagactgtgattgacggcgacatcgaaatcgatgccctggagtcctctgtgattgaccagtgcgtcaagttgctcgccaagcagaatccggtggccaccgatctgcgtgtggtcgtttccaccatgcgtctggcttccacgttcgagcgtatgggcgatcttgcccgccacgtggccgaggccgctcgccgcacctatccggccgccgcgattcctgaatccgctcaaccggtgttcgccgagatgatcgacttcctggacaacaccgctgaccagctggtggccatgctcttcgatcgcgatgccaagaccgccgaggccatcatcctggctgacgacaagctggacaatctgcaccaccagaccttcgatctagcgctgtccgatgacatcacccgtcagcagaccgtggatatcgtgctgctgggccgcttcctggagcgtctcggcgatcacgccgtgtccgccgcccgccgtgtggtgtacatcgtctccggcttcgaccccactaaggagccgacccgcgacgagggcaccgacatcgactgattgggacttgttctcacattgggcgaataactgaacacttgttctcctgtggtttgaggaggatgcccgaaagcggcgatccggctacggctggacgccgttttttgttgcttttgggcggtacaccggcgtatccatggggcggcaaaacacccatagggcggtaacttgcccatggggcggtttgaaggatatgtgaaaccgcggaattaagccattctggcataccgccccatgagggttttaccgccccatggggtaatcaccgccccatgggggatttggcaggcatagcaaaggggagccgcacgttatgtgcgactccccttacagcttgtaccgtgttagcggcttaggctcacttctggccctgagcggcgacagcggcggcaccggcagcagcagcctccgggtccaggtactcgccacgcggcttgatcggcttgaagttctcgtccagctcgtagagcagcgggatggcggtcgggatgttgaccttggcgatctcttcctcagacaggttgtccagcatcttgacgatggcgcggagggagttgccgtgggcagcaatcagcacggtcttgccggccttgagctccggctcgatagcggactcgaagtacggcttcacacgctcaacaacgttggccaggcactcggcttccggaaccggatcgccggcgtagcgcgggtcgttgttctgggcgtactggtcgttcgggtcgatctcgggcggcggggtggcgtaagaacggcgccacagcatgaacttctcgtcgccgtactcttcgcggatctcggtcttgttcttgccctgcagagcgccgtagtgacgctcgttgagacgccagtcacgctgaaccggaatccacagacgatctgcggcatccagagcgatgttggcggtgttgatggcgcgacgcagcagggaggtgaacacgatgtccggaaggacgttcttctccttgagcagctcgccgccacgcttggcttcggcttcaccctgctcggtcagcggtacgtcgacccagccggtgaactggttagttttattccatgcgctctgtccatgacggagcagtactagtttataagtcatacggttcagtctacagccgcgtgcgcccaaacacgagtattcgtcttattatttcgctctcatagcgccacggcaaccgccagcaccaccgcaaacagcaagatctggaagctggcggcgggcagagccgggcggaattgacgtttattcacgctggagaccatgcgcacaggtattccggtgcccgagagcaacagcaccgcaccccacggccaccataatgtaccgcacatcagcagggcgatgatccatgcgatgacgcagcacacaatcagcaacgtacgcgcgccggactcccccagccgtacggccagcgtgtgtttgccatgctcacgatcctcgtcgatgtcacggatattgttcaccatcatgatcaggcaggagaacaggccagccgccacagcacccaatagtccgccgacgtccaccgtgccgcacagcgcgtattcggtgcccaataccgcagccaagccgaagaacaggaacacgccgacttctcccagcccgacgtatccatacggatgcttgccaccggtgtagaaccagccggccagcaaggaggccgcgcccacggccagcaaccaccatgcttgggcgagcacgaccgccacaacaccgcatatgcaggcgatggcggcgcaaatcatcgccgcgaacagtacatgcttggccggtaccagtccggatgcggtcagtcgctggggtttgcctgatttcgattcgtccatgtcacgcccggcgtcagtgccgcggatgccgtcggaatagtcgttcgcatagttgacggcgatttgcaggaacagcgcgactagcaggcacaggatggtcaccggccagaatcggtccatcagcagggtctgctgttcacgggccgtggcgcaggaggccggttctggatatattgcgatgcaggtgcccgaccgctcgatatgcacgtacgccatcaccgccccaaccatcaccgacgcgatggaagtgaccaaggtcttgggacgcgcgccccgaacccataagccgatagacataagcaatccctttcatatataactctggctcccctctctgaggggagccagagtatgcctaatcagccaacgagcggcttgaccagcgggaaggtgatggtctcgcgaatcgtggcaccggtcaaggcgataagcagtcgatcaatgcccatacccataccgccggccggaggcatgcccacgccgagagcctcgaggaagtcctcatcgatgtcgcaggcctcttcgtcgccggcgagtgcgtccttggcctgggccacgaaacgctcacgctgcacgatcgggtcgttgagctcggagtagccggtagccagctcgaagccgcgcacgtagagatcccacttctccaccacgccgggcttggtgcggtggcccttgaccagcggggaggtttcgaccgggaagtcacgcacgaaggtgggctcgtaaagcttgtcctcgtagaagtgctcccacaggtgttcgacgagcttgccatggttctccacgtcgtcgcgctccacgccgagcttgtcggcgatggcgcccaaatgctcaacggaggtgccgggatgctcagggccgccgttcggcacgatttcctcgcccaatgcctcggacagcgaatcgtacatgctgatggtcttccattcgccgccgaagtcgtattcggtgccgtcgagcagggtgaccttgtgcgagccgtagacgtccatggcggtcttctgcacgagctccttgaccagctggccgatggaatcataggtgccataggcctggtaggcctcgaccatggtgaattcgggggcgtgcgtggcgtcgacgccctcattgcggaagtcgcggttgatttcgaacacgcgatcgatgccgccgaccaggcagcgcttgaggaacagttccggggcgatgcgaaggtacaggtcaaggtcgaaggcgttcatgtgcgtggtgaacgggcgggcggccgcgccaccgtgcagggtctgcagcatcggggtttcgacctcgaggaagtcgtggtcgtcaaaggtgcggcgcagggaggccacggccttggagcggttgcgcaccatgttgcggatgttctcgtccgcgatcatgccgatgtacggcttgcgggtgcgggtgtcttcgttcaggtccttgtgcagggccggcagcggctgcagggccttggaggcgatagcccactcagtggcgaatacggacagctcgccggtcttggaggcgatgacgcggcccttgaggtacaggtgatcgccaaggtcgacgagctgcttgaactgcttgagcgagtcggcgccaatctccttcttggagatcatgccctgaatcttggtgccgtcaccggcggacagctgcacgaagcacaggccgcccgcgttgcgcaggaacagcacgcggccagcaatgccgaccatgtcttcggtctcttcgccagcctcgagcttgccgtcatacttggcgcggaccgcctcgatggtgtcggtgacgtccaagtgcaccgggtagggggcgatgccggcctcaagcatcatcgcgcgcttggccacgcgcatctgcacctgctcggggtgggccagcgggccgaactccttgttggaggggtccacggcttcgtccagcgtggcaccggacttgatcttctcgcggatggtggcgtcctgcttgagcagcatttccgcacgttcgacggtgctcatctgcgggacggccggggtttcattctcagtgttttcggtattttcgacaacttcagccatgattcatcagtgtacgcaaggccggcgattatgagcccggcagaccgcacggccatctgaacacccgctcacatgacgcaaaaccggccctgcacaaggcttgagagacctgtacacatggcgaatccaccatcacgcaacactcgcgacatgccgatttgcattgtccaccaccacaatgtaatatctacatctgttgccaaacgggctgtagcgcagcttggtagcgcgcttcgttcgggacgaagaggccgcgggttcaaatcccgccagcccgacaactggaccggattgttgagaaatcagcaatccggtttttcgtttcctgtcccaacaatcaaaccaagcgatcgaacagcggtaaacaacccgccgcacacagcgacaaaccacatcacggcaagcccccgtatttgttggcggaccaccgtaatatatcgctcgaatcaatcgattgccgcactgtttttgtaagtaatactgaagtaattagaggaaccatgaagaagagtctgcttgcactggcttcgggcgcgttcattctcggtgccgccgagttcgtgatgatgggcattctgccgcaggccgcggccgccaccggcgtggacatccccaccgcaggccattacatttccgcgtatgcgatcggcgtgtgcttcggcacactgattctggtattcggccgcaaggtgccgccgaaggacctcatcatattgtttatggtgattgccttggtgggcaatctggcttccgcattctccgtcaatgccgccatgctggtcgtcgcacgattcgtcgccggcctgccgcacggcgcattcttcggcacagccacactcatcgccaagactctggcggaggaaggcaaggaggcgcaggccgtatccgtgatggtcaccggacagaccgtggccaatatgctcggcgtaccggcgggcaccttgatggccgagttcctttcctggcgtcttgccttcggcattttggccgcttgggcggcaatgacgattgtgctggcgtcggcgtggattccgtacgttgcaccgatcaaggacgcaggcatcgccggtcagttcaagttcctcacccgccgtggcccgtgggtgattttggccgccgtgttcaccggcaatgccggtgtgttctgctggtggagctacgtctccccttggctgcagaaaaccggcggatggtcgtcttccctggtgccgatgctgatgatgcttgccggctttggtatggtcatcggcggtctgcttggaggtcgtctgaccgaccattggaggcatgccggcgcggccgcaataggtcagtccatctcctgcctcggcttgttgctggtgcttatcactccgggtaatcagccgatgaccgctgtactgacgttctggatcgccatcggattgttctttacttccgctccacagcaattgctgatgaccgaagccggccagggcggcggcgagctgatcgccggcgcggctgtacaggtggcgtttaacttcggcaatgccatcggctcgattgtcggcggcgcgatgctcaccaccttctcgatgaactatcgctataccggcctgggcggtatgccgctggctctgcttgccgtagggctgctggccttctactcgtggcgctgcgaaaccgataccgacgccattcaccgcttgcgcgaaaccaaggtggactgagaccaagctcacagcaaactccctgacgtgtttgttcacagtattaatagactgaaatcagacacgattcagggaggtctggcggtatggacgaggaagcactgctcaaacaattcgccgcacaattcgcgcatggtccagacgatgccgacgacaccgatgcggcggccgcagcgcaaggtgccgattctactgcgaaccaggccacggacgatgccgatcaatcgcccgcaacctttgatacccaacaattcctgaacggactggacgcgattttcgatcgccacgcggcagccaccgaagccggtccgtacttggaacaggcgatggtggacgcggaaaacgccggcgacgaggccggactgctcaccgtactcaacgaaacgatgggcttctatcgctcgcagggccggcacaaggagaatcagtggattgtgcagcgggcgctggaactggccgctcgtatgggcttgaccaccggcacatccgaggcgtgggccaccacgctaatcaattgcgctaccgcgatgcgcgcggcccaacaatacgatcaggccgaggatttgtatcatcaggcgcagagtgtctgccggcattcgctggcacccaccgaccgtaggctcgcagcactgcacaacaatctgtcgatgctctacagcgagacgaatcggcccgacaaggcggaactggagttgcgtgaagcgctgcgcattatcgaagcctcgagcgtgaacccggacgcggatatcgacgtggccagctcgcacacgaatctggcgttgaccctgctgaccgaacacaagttggagggcgcgcattggcatgcagccaaggcactggaaatctatcgcaccggccatctggaacattccgcgcattatgcctccgcactggcgggcttcgcgcaggtgtgctttgccgagagacggcatgcggatgcagttactggataccggcatgcgctggccgtgatcgaggaatgttacggcaaggacaccgattactggcgtatcaccgccgacaatctgcggcaggccgaggaagaggcggcgaaggccggggtgacggttgacaatgcgggtgttgccggcgatgcaggcacgccaccccagtccggatcgcggctgtcgaacagcccggcacagggcaagaccggtgcgggcgtcgaggcacaggtcggctccgcgtcatcggccgtggacgcggatacgccgggcgcattggcgcaggcgttacccgagaccggtgcggacgcgacatcttccccatccaccgtttcggtgtcgaccggttctgcgggcgcggccgaggccgtttccgcatgcccggtgtccggactgaagctggcccgcgcgttctggacgcagatgggcaagccgatgattgcggcgaagtatccgcagtatgccgggcgtatcgccgccggtctggtgggtcatggctcggaatgctacggattcgatgatacgtattcgcaggaccacgatttcggcccgcgcttctgcctgtggcttacggatgaggattacgcggccatcggcgagcaacttgaggccgattacgaggcgctgccgcgcaagttcagcgtggatgcgcaaggccgcgtgacgttcgaggcacatgccagatccgatgcttccggggcattcccctccgcaggtgcaggctccaccgtcacgccgcgcgcacagggcgcgaatcgccgtgacggcgtgttccgcatcggtgacttctttgagtcgatcaccgggtatcgcactgcgcccgcgcaaaccgcgccgcacgagtggctgatgcttcaggaatcgaccttggccgccgccaccaatggcgaggtgttcgccgatcccaccggtctgttttccaagacgcgccaagggttcaagaacatgcccgacgatgtgcggctcgcgctgatctccaagcgactcggcatgatcgcccaggccggtcaatataatctgccgcgttcgttgaagcgcggcgacggcgcggccgcatggctgtccatccacgagttcgtgcaggccaccgcctcgttggtgttcctggttaacgtgccgatggtggtgggctatatgccgtattacaagtggcagttcgcagcattgcgcaagctgtctggctcgatgttcgcgctgttgccgaacgtgggcgaacagttggaaaccgtgatgcgattgagttcggcagcctgctatggcggggccggatttggcgaaggcggcaagggcgcggctccagcaatcgagaaaatcaacgatattgtggagcagattgcggtggatatcgtcaaggaactcaaacgcgaacacctgaccacgtccggcgagaccttcctcgaatggcagcgcccgtatgtcgaggaccacatcgcctctgatgatccggtgcttaaaagtttgtagattcaagctccctctgccacggcttcgccatgccacctccctcatcagagggaggtatcagtgaaaggaacgtcgatgaccaacgaactgactgatgatgaactgcgcgaggctattgtgcgtcatgaatgggatcagttccagcgcaccaacaatgagggtggacgcgcggcatgccaaggcaactggccggtgttccaccagatgcggttggcccagttcctcacatgggagcggccattactcaccagctatgccgctgatcttgacgcggccgaccacgtgggccgcaacctcgtgaccgaaaaatacggccgcatgatggcctccaccgcaccggaaaatttcacgaagaacatagagccgtatattccgcgtctctctgaagagcgcgcggcccgtcaggaacaggtcatcgcccagcaggtcgcctgggccaaggatttccgcgagcgctaccccaagctcggcgaggcgatgcgcgcactcaccaccaccgaagacacaccatctgccacctcattcgaaacctatctgcgcggcgagcttggtacgtattccgaccagaccttcgaacgttacgaagcgatgattggcgagcgcgccgcagccagcccgcaacgcaatatcactgaggaaaccttgttgcacacagtccagctcggcggtttcgacaccttagaggaggccgaagcctcccaagcgtaatactcagccattcactgtgtatcggacaccccgactgatgtacgtcggccggccatacccaggccaacgcaatctgccgatcgccccacacccagaccaccaacgcagcctgcccgccaggccccatttaccagcgcacatcggcagaattacagcgagaataggccccaaaatgccagtgtcatcagtgtggcgagagtgccgagcgctaccatcacgcatatgacgcgccgcacaccgacgatatcggcgcggcaataccagacacgttccatttcccaagcaaacagcaccaccaacagcatggtcgctattcgcagcaccacccatccgacggcaaacagccgcggttgaggcataaccaatacagccgatacgcctacggcgctcatatagccgtacaacagcccagtaatcaccatcaccgctgtgccgataccggcagataagccggcaatgccgtgcaacatgcgccgctgggcggcccccagctcactcggcgtcgcatgcacggcccacacagtcgccacactacgtcgcccggccagcaacgtctgtagccaagaaaacacagtcaagccaatacctaatatcgccgccatcacgatcagcacgggccctgccaccatcagaccggccagcacgccaagcgagccgacgataccggatctggtacgttgcgacgcggcgaagcgctggtgaggtgttgcaccggcgacttgaggcgttgcccatccatcggctttggttccggcagtcacaccgttcacccaattttccagcgcttgcgtatagccttcggccaatggcaggttcggggtgaataagccctcaccagcccgcatctgatggttgccggcaaaatagcgtacggtgacgttctcgttgccggacttgttggccgtggcgatgatccgctgcgccccctgttcgatgggtatggccgtatcgtaggtgccgtagttcaccagcaccggcatggtgagggatttcagataccggtcggcatcaaagtcggcataggctagatcaaatggcgcgtagtccagcgacatcaatttggccatgtctttgaccacgggcttgggcgcgccggcctcatgcgtataggcgctgacagccatggccatttgctcacgtccattgaacaccggtgcggatgtaagtacggcaaaggcaatgtcttgccgtttcgaggttagaatcgtggcgatccaggtgccttcggattcggcgtagatgccggttttggcggggtccacgccgattctgccacgcaacacgtcgagcgaacgcccgtattcgcgagcaaaacgcgggtagtcgcgatgcagcacggtgtagttgtcgttgcgcttggccggcaccaaggtcacgataccggcagaggccatggcgttggcgatatcgccgaaatcctcggcaccactggtaccggacccgtgaatgaacagacaagccgggcgtggcccgggagcgccgaccggttcacgtagtacggcgggtagcgtgacgccgtcgccggtcttgatggatagtcgggtttcacgcgtacgatatcgcccctcgtggggaatgttcgcatgggcaggggtgatggtggtgtcggcagaagcgatagcgatgtgcttggtgtagggccgtgtgttccattgcggcatcatcgcccagccaagtgtggcgaataccagcgtcatcgccatcgcggtggcgatgacgctcgctacccgccgcgccgaaatccgtttcatagttactatgcctcccccccatcagcatagaacggtcggctcttatcggtcggctcccgtcataatgtgcttctactgggaccgtaatgcaatggtttgtaacgctattttctcttcttgacggcaccgactatggcccatacaacggctactattaccagaataagtcccactacggcgcagataatagccgtcagcaattgcggattcggcgagaacagcgaaatcatccgatccggagatatgcacccgaaaaccagcgcgatcacgccgataatcacgcctaatagtccgaataccacagtaggcgcgctggtgctctgtttctggatgttcttggcactcttgacatccttagcactcttgacatccttagcattctggacatccttagcattctggacatccttagcattctggacgttcttggcgctccccccaggctggcatggtttgccggcggtctgagactgcccatagggaggtcgtgctgaagatgctgcgtacatcggcacatcatcggcagatggaatcggcccaccatctccctccacggcatcggcaactgtttccagggcaatccgatctgtggttggttcgatgggcgatggagaggcagctgttgcctgcgtatccacatccgagaccgacgcatccgcatgattgtcggggacgggcagcacagccgtttcgtcatcatccgctgcggatggcagcaccgtggtatcggttcggtcatcgacggtcaccatggttgtggtcgcggtggtcgcgtcggtttcggaaggtatggccgtggtcggtgtcgcatcctcgatggaggcgaattccttggtttcatcagtcatgattccatctcctggttgcaacggcttgatcattccgattgttcggttgtgttcttgcttgtactgttgccgtcgtatatatcggcaagcggctggaacgtggagccttcccaatcggaggcgtacaccacgttgacacgtgcttccaccacatagggaatattgatttttaattctgggccgttgtccggcatggcggattccttatacaaccattcgtgatcaggcccattggtggcactttcagcttcgaagaaaacaaagcttggacccatgtagttgttgtataccatctcgtatttgccgccaacgtcactcgaagtggagtagtaggagtcggcagtgccgaaggcgtaagtgcaggaatccggcagaacgatatgcacttgcgcctgtgttgcggctatggtgatggtaccgaccgggcaattactgatggaagttttgccatccagcatcttcaccgtgtgcggtccatgtgtcttgtcccaatcggaccaatcaatgattgcctgatcggtgttgtagttttcaccgctgaacgccacaccttgctgcaatgtttcaaacgtggcatcgctggcatcggcaacgaagatgccatccttttgcacatcgttcatgccgtcgctgtttctcgcactgacagattggctcagtgaaacaacagtattgatgccgctggcaccaagatcacggtagtacacgccatacgtgcctgaaacgatggtcatgcagagcgcgcatccaccggcaaccagtccgagaggaatcagaccaccggtacgccgtcctctgaatccgagaatgatgaccaccagccccatcactatgcatactgcggcaatccagatggtgcccagacgcataatgccgataatgcccatgtcgtttacccaaatcagtcccatcagaccggcaaaggagaggaaggtaaggcccagtatgctcaagaccacgattgggcccgccggcttgcggcgcttggactcggtgggggcataggccgtcgcattcatacggtcgggggcaaacggcccgttgggcactgtgccgggcatcgcgccgggcacagtacccggcatcacgctgggcatcgactgatagacaggctgtgaaacaggctgtgaaacactaggcgcggtttgtgaaacaggttgtgaaacaggttgtggaaaaggttgcggagctgaatacaaaggagattgaggtactggttgcgcggctggatatgagacaggctgtggagctggatatgacacaggctgtgaaaccggtcgcggcgcagatgccccgaatccgtacccttcctgctggcgaatgccgcttttggccaacagccatagcgctaaggcggcgagcgcaatacaaccccaccccgcacctggaatcacgattgccacggcgaggaacaggaagcatcccagacaattccagtcccattggccggcaatgaggtcctcggccaagatgtgcccatcgcgtacatccggcatcagaaaccagccgagtgcgtacagagctgcgccaaaaccgaagaacaatgtacatacaatcaccaacgcacgtactaatgtggggctccagccaagccgtaaagcgatgccgctgcatacgccgccgatccaccggtcgtcgccgcgaaccagtccactggatcgcacccaagtgaagaagcgtcgcgatgtcttgtttttttgcggaccaggctgcggctgtggctgatatggattcgcgtttggattgctcatgattccattacaccgcccgaccactgccacaacgctcggggaacaccctgattgttccctgaacaccgggtaaaaccccggccgcaacgccctgagcgcggcacaataggagtatgacgtcatctcccgaaccattgctgcccgcgcgcatgccgttgatgcgcccccggcagggccgttggctcaccggcgtgtgcaagggcatcgccctgcacttgggcatcggcgtggcatgggttcggattgcgttcatcgcactgaccgtcctctacggcgcaggcatcatcgcttatgtattcctgtgggtgttcatgcctgccggagacccggtggcggctgcggctcgcacagtgcccgttaatcaggcgccgcttgcgcgaggcaatcagccacttgccgctcatgacgacgaatcggctgccgcaccggaatcattgtccgaggccatccaacgtgctccgaaaccggccgtcgtggcattggccggtttcgcgttgatggccactggactgttgctcaccagcaccggtgcggatgtccagattgtgtttccgctgctggtagggttgggcggcatcgcactggcatggatgaatcttagtccgcgaggcacgcagctgttgtctatgttgggcggcatcgcactgattttcatgggatgggcattgtatgtgcataatgtcagcattcctgggtggggcacctctcctcgacgcattgttgccagcggattcgtgatgatcgtcggtatcgtggtggcggtgatgccgtgggcgaacgcgatgctgcaacgactcacccacgagcaggcattgaaggagcgcgaagaggagcgcgcggacatgaccgcccatctgcatgatggcgtgctgcaaacgttggcgctgattcagctgaactccgaggaaccgaccaccgtattcgccctggcgcgtagccaagagcgcgagctgcgcgaatggctgtatcaggaacgttccacatcggatcgttcggtgggagccggattgaagcagatcgccgccgaggtggaggacgagcacggcaaaccgattgaggtggtcaccgtgggcgacgcgcggccgagtgcccagaccgatgcgctgctggacgccacccgtcaggcgttggtcaatgcggtcacgcatggcggcgagccggtgtctttgtattgcgaggccagcgacacgatggttgaagtgttcgtgcgcgaccatggcgaaggcttcgatatggacgccattccgcccgaccggctgggcatccgcgaatcgattatcggccgcatcaaacggcgcggcggtacagtggagatagtgtccagggccggctggggcaccgaggtcagaatgcatatgccgatagcgctgaaagcggcgcagggagaacatcgatgagcgagaatgagacagccaagattcgtgtggccgtggtcgatgaccatgagatgttccgtgcgggcgtaatcgccacgttgcgtgattccttcgatatcgtcggccaagcggcggacgtgcccggttcggtggcgatgatcgcacagaccaagccgcaggtggtgttgctggatgtgcacgtgcccggcggtgaaggtggcggcggtgccgagatcctcgccaaatcgcggccctactcccctaccactgtgtttctggcattgtcggtttcggatgcgccgcaggatgtgggggcggtgattcgcgccggcgcccagggctatgtgaccaagacgattaccggcgctgatttgatttcatccatcaagcaggtgcatgagggctatgccgtgttctcgccaaaactggccggttttgtgctttcggcctttcagggtgtgccggcggcggggtctgatggcggcgctgatggtgcggcacgggctcatgatgaggagctggaccggctgtccgcccgcgagcaggaggtcatgcggctgatcgcgcgtggttacacgtataaagaggtggcggccgaactgttcatttcgatcaagacggtcgaaacgcacgtgagctcggtgctgcgaaagcttcagctttcgaatcgcaccgagctcacccgctgggccgccgataggcgcattgtgtgataaacgacagatgagctcccccatcagagggagctcatctgctcatatcactcggcgtcgcggaaaccgttggggttcttggtctgccagttgagggaggaggcggccatgtcgtcgatggtcagctcggccttccagccaagctccttctccgccttggaagcgtcggcgtagcaggcggcgatgtcaccggggcgacgcggcttgatcgtgtacggaatcggatgaccggcggccttctcgtaagccttgatgacctcaagcacggagtagccgtggccggtacccaggttgtagacgaacacgccttccttgtcgatgtggtcaatgacggccacgtgacccttggccaggtcgaccacgtggatgtagtcacgcacaccagtgccgtcgggcgtgtcgtagtcgtcgccgtagacctggacttccttgagctcgccgaccgcgaccttggccacgtacggggtgaggttcgccggaatacccttcggatcttcgcccagcaggccggactcgtgtgcgccgaccgggttgaagtagcgcagcagcacgatggtccaggacgaatcggccacatgtacgtcgcgcagaatctgctcctggaacagcttggaggtgccgtacgggttggtggtgccgccagtcggcgtctcctcggtaatcggcagttccttcggcgtgccgtacacggtggcggaggaggagaagatgatcttcttgacgttgtgcttcttcatcaccttgagcagcacaagcgtggagtacaggttgttgtcgtagtattcgatcggcttggccacggactcgcccacggccttgagaccggcgaagtgaatgacccaatcgatgttgttttcggtgaagacgcgttccataagcgcctcatcgcgtacgtcaccgtcgtaacgcttgaccggcttgccggtgatctgctcgacgcgctcaagcgccacgggagacgagttgccgtagttatctacggaaataacgtcgtagcccttgtcgagcagttcgatgtcggtgtgggtggcgatgaatccagcaccgcccgtaaccagaacagtagtcatatctcctcctttggaaggacttgccttcggttttccttcagtattgagcttacttcacttgacctgtttcacctagcggcaaaaccaagactttcgaggaatgtttgcgtggtggctttctgcttgaagacggccgtgttgccgaggatgcggtagcagacgctgccgagctcgtcacgtacggcttggtggatggcctcgcggtcgcggtttccggccaatgtttcagcgagttcgccccattcgagactgaattcgctgacttcatcgggcaaatcgcggccttcggcgagcgcctcctcgacgatgccgagctggtcgacgagccgtccgggcaggatgaacaggccttgggcttcgatcagtccaatcggctcctgcttgaccggccagtattcggggtgtgcatggaaaataccttccgggtactcgtcgctgatcgcattgttgcggaagatgagactcatctcatagccacgttcggtgatgatcgcgctgggcgagagggcggattggcggttgccgtccgcgtcatggctggcgatgccgttcgccgcgtcgtcataaccgacccatgcctcgcggatgatgtcggatacgtcgatgatgctctggcggtttttcgacaccacacgcacggcggtaccgggccagtcgaggatttcgaccacggcgtccggatagtcggcgagcgtgaaggcggcccaagtggcggccttgtgcatcggcagcagttcgccgccgccctggtagtggtcgtgggcgagcaccgagccgccgatgcgaggcagcgcggcgttgcatccgaggaagtatccggggaagcggtccacgaagtcgagcagatggccgaaggtgtcgcggtccacatgcatcggcgtgtggtcggtgttcacgcagatgccgtgctggtcgaagtagccgtagggcgagaactgccagaaccatgactcgccgccgagcgtgaccggcagggtgcgcagcgtgcgcttgtcacgtccggcgaagccctcgttctcatggcagatcgtgcacttcgggtagccgccggacacggcgttgccggccgccgccttcttcatgttcttgaattcgggtttggcgaggttgatggtcaccgtcagcccgtgcgagtcgaagcgcgggttccggtcgagctgggcacgcttgacataattgttggccacacagtagtcgtagaaccattgcatggcggccatgccgccgtccctgtgctcgatgagcaggaaccggtcgtcgagatcggcggggttggcggagaggatgcccatgatggtgtcggcgtaggccgggccttcctccggatcgaagaggccggcggttgtggcggcggcgcggaaggcggcgagtagggggtcgggggtcttttcgtcagagggggcctggcttcggctgccgacaatgtcttggactgcgtctgacactgacgccgccgacgttgtggttttgggtccggggtaggaatccaggtggaagagggcgaagatttggttgcgggtccagtctgcgttgcgtggatcgaggtcgagatgatccaaggcgtaatcgactagggcgtcgatgctggcgtatacctcggtcagctgatcgctcattgctcggcccccatcatgctggttcgggtatggttcgactgacggctcacctggcagcctccatgatgtcggctacgatggcgtgggtttcactggccttctgctccatctcctgcacgagtttgatctgggtgcgggtgcgcaccagattatgctcggggtacttggtggcaaagtagatatcgccttccaagtagtcggcgagaaagcgcatgccgcattccatggtgagcaggttgccgctgaacggcagcagttcggcctcgcgcgcggtgatgctgccgcgtagttcgcccacgaagccttccgtgtaggcgcggaacagctcggtgctgaaatgcaccttgctgaggtccttttcgtcttccagagcagtggacgcaccaaagcgtatggaatcgccgaagtcgaacagcatggagccgggcatgatggtgtcgagatcgatgatcgcacgcgccttgccggtggtggcgtccatgaggatgttgttgagcttggtgtcgttgtgggtcacgcgcaacggaatcgaaccgtccctgagcccatccatcacgacggcatactggtcggcgtggctcagatagaagtcgatttccggctggcatgcggcggcgcggccgagcttgtccgcggcgagggcggccttgaagtcctcgaaacgatgcggggtgtcgtggaagcgggcgatggtttcggtcagctggctggcgtcgaattcggacaggaagttctggaagtcgccgaatgcgctgccggcctcgcggaacacgtccgggttcggcacgaggttgtacgacacggtgtgttcgatgaacttgtagacgcgccatgcgccgccatcgatctcggcccaggtggcgccggaggtggtgggcacaatgtccagcgtctctttgccctgagccttgagagtggaggtgaccagttcgacattgcgcatcagattcaccgtatcggggaagatgctggtgttcatctgttggaggatgtagcgggggccgtccgtggtcaccagataggtggtgttgatatggccgtctccgtaaggttcgatgccggtcacggcaccttccagcgcaaaatgcgaggcgatgccgaataaaacttcattgctttcggtcatgatgggtccgttctccaaaacgcgggatcaggcttcacgccatgcgatgccgctgtcgggcaggtcgaagtcctcggtggtgccatcggccagagtcaccgtggtccgctgcggttgatcggtgttgttgattacgcagtacaacccttgctcggggaagtgcgccacctcgcactccgggttggacgagctccaagccgcatacttgtcttcgttgtgggaggcgtagaacagcacgcgttccagcagtcgggcgttggccgccgaatagggcagaccggagatgtacacaccgcggccttcgccataatcattggtcgcgagctgcacctgcccgccgtccgcgcgcagcagggtcacgttttcattgaccggatacgtgttgagcacgggttcgccgaagtcgatgccgcccaacggcttgatggactggccaccgccgcaaccgctcagcgggatgcggtagccggcctgttcccaagcctcgcgggccgccgggtcgaccggcacatcggcggtgatgaagtggtccggcaccaccggtgggaagtacttgtccacggagagggtctgatagcgctcctcgtccacgccaatcacgtcggccagctggaagaaccggcccgcttggaagcgcggtgccgagctcggctcgcccacgcccacgaacgcgccgccaccacgcacccaggcgcgcacggtttccacgagcttcgggttggtccacacgtcgccgccggtgaatgcggtgtcgaccgggccgccgttgatgattacgtcgatatcactatcgatgccatgcgcgagtacgtcgtcgaagctgatgaaccgcacgttcacgcgcatgccggacagggattccagaatgccgtagtaggagtaggtctgcttgttgggcagggcgtgtgccacggtgaacgccatccaggaacgcatcttgccccaggaattcagaatcgccacgttgagctcgccttcggcggccatcccaccggtgcggtcgtggatgtcgcggaattcgtcggcgatatgggtcaccgtgtccacgaacttcgggaacttggcggccaaggagaggtagccaccgtagcccatacggccgatcggcgaacgcaggatcgcgcggcgggccttacgccagttgtcgaggccttcgatgctcgggtcgttgccctcgtagaacgtgtcggggaagaagtacggcaggaagcgtccttccgtgtatttgacgcccggaatgtccgcgatcatgcgggtggtggtgccgtctccgatggagccgacgaccgcatccaaacccagcttttcgaacccgtccttatacggttcggtaccgatccactggtcgccaaggaacatcatggcttccttgcctgccgcgtgcgacatgtcggcaagccgcttgacgttctcgcgcacgaatccggagaggaagtcaatccagtcgcgttgcgccttgcggggcacgcgccacgcggagttgtaggcaccgccatccacgaaatcctccggacgcagacggtaaccgtactccttctcgaaatcgtccaatgcgcgcgggctcacggtgcaggcgcaaccgaaccagtcgaccaccttttcgcgacgcttggcatcgaacaggagcgtgaactggtagaagaacgtggtgaaacgcaccacatccacctgcgggctgtccttcagccactgctcgaacgtatcgaacacgaacttgcgggtggccggatggtagatgtcgaacggaatctcgtgttccttgtctccccaatcattggtcaggtggttgtacatctcgaccgggtcccagatgatgtaggccaggaaactcaccgtgtattcgtgcatcggcacggcagcggtcacgtgcacggtgtcctcgcccgggtcgagcgtccagccggacgggtccacgacctcgcccgtggtgcggtccacgacttcccagtacttatgagggtcggcgtcacggttaggcttgagctgttcctcgaagaaaccgtccatcagcggcacatccaccgcgttggactcggccaggatacgggcggtcagcaggtagacctgcggggtctcgtccatgtgcagggtgatccactcgttgtgggcgcgggtcgggaagtaggcgctgtagattttcttgccaagagcgagcactgcctcgtccagatgcgtgccgtcggagttgcggatggcgtccgcaccccacaattcggcgagttccttggtcttttcggcaaaattctcttcactgggcagcgtgaagcggccggtgctggtcatgagtgctcctttgtggggttggtcatcaaaaaactacaaagcgacgaattcgtcgcatacaaaatgaccggcgtcatcgcgggccctgggaccctgactgcgtagatccttgacgcttacggtgacgccggacgattggaatcgtgtcactgaatatgggagggacgttgcccggcaccggaaggagtgacacgacatgccgggcagcggattggttagcctttgacggcaccggcggcgaggccggactgccagtagcgctggaggccgaggaacagcacgatcacgggcagcacgccgagcaacgcacccatcatcagggcgccgcgatcggtgaacgtggccagcgagaccatgccgtacagaccgagggtcacgggcttcaaggtgtcggaagacaccatcatcaacggcagcaggaagttgttccacgtggccacgaacaggaacaggaaaatcgtcaccatggccggggccaggagcctcagcacgatggtgaagaagatcctcgcctcgctcgcgccgtcgatgcgggcggcttcaagcagttcgtccggcaccgaactctgtgcgtacgtgcggcccaggaagaagccgaacggcgaaacgcagcacgggatgatgatcgagagcatagtgttggtcaggtgcagggtgtggaaaatcgagtactgcgggatggtcagcagtgcggcgggcatcagcatgcaagccatgatgacgccaatagcagcgttcttgccgcggaagttgaatttcgcagtggcgtagccagccatcacagacacgatggtgccgatcaatgccgagacgcccgagtagatcagggagttcagcacccagcgccagaagttgccacgagtccagccaagcagcttggaatagttagtggcgatggcattgggcagctggtcaagcggcacagcaaaccacatgccgttgctaccggtcatctgggccggtgtcttggtggacgcgatgatggcccagtaaatcgggaacaggaagtaaatcaacaccagtaccagcagcaccacggtgagggtcttcacggccgcggacggtcgcatggagcgaggcaaatcgtgttgcgcagcctgacgctgcttctcgagcttgcgctcggcctttttgcgggcgcgctcttcaacggttgcggagctcattactcgttcaccttcctttcggccaaggtgtacagcacggcaagcacacctgcgatcagagccatgacaatggcgatggccgaggccggaccgtcaccagacggggtaatggtgccctgagaagtgttcatggccatcatcatcggtgtatacgacttggaaatacccggatcagccgtagacatgatctgcggttcgttgaacagctgaatggtgccgacgatggaaagcagcatggccagcagggccgcgccacgcacgttcggcagcttgatcttcgtggcaatctgccaaccattggcgccgtcgatacgggcggcctcatagaggtcatgcgggatggcctgcagtgcggcaaggaaaatcagcatgttgtagccggtgaaggtccatgtggtgatgttggccatcgagccgagcacgatgttcttgttgaagaagtccacattgacgccgatggcggcaagtcccttgacgatcggcgagatttggccgttgtacaggtagacccagataatcgaggccacgacgccggggatggcgtagggcaggaagtagcccagacggaaaccggtgacatgcttgaccacgaacgagtcgatgacgatggccaacgccagtgcggcgatgatcatgatcggcacctgaatcagggtgtagagcagcaccctgccgacgccggaccagaagttgccggaagtaatagcatactggaagttctggaatcctacgaatttattgaccagctcgccaccgccgtatgcgccaccgccctcggtgacctgacggaagaagctggaatagatggcccagatgatgggcaagatgaacacgaaagcgaacaggacggcgaacggtgccatgaacgcccagccggtgcggttctcgcgcttctgagcgccggaccgcttcggcttggcggcggcacgcctaggtgctttgcccttcgcctgagtagtggatgcagtcataatacaaaacctgtcttcgcaaagaacagtaaaacaaatgacaagggccacagcgcccctgcagcaatacccccaaacaatacggaaggccggagtatgcgccccggccttccgctatggtgatgcgaggcatcggaggtcttggacggccggctatttcaagccggcccgttgacaagacctagtgaggtcactccttgacggacagaccgaggttcttcagcgtatccaccgaggtcttctgagcggtgtcgaacacatccgaaaccttggcagaaccatcggcagccttggcggcggtctgtttcattgcagcgccgactgcggagaagccaggcatgtaggtgaagtcacccatgttgtcgttcgcggtcttgaactcagccatgacatcctgtccgctgaagtagtcggaccacttctgcggggtcttggcatccgcggtggtggcggccacgacaaggccctgggagacaaggtcatcaatctgggtgttgaaccagtcaaggaactccatggcttcggccgggtgcttggaacccttgagcacggccacaccggaaccaccatcggagccggtcttggtgccattgccgaaccagtcaccgagctgggtgaccttccactcaccagcaccagtgccaccggcggaatcgatgaacagtggggcttcccaagcggcggccacggtgccgatcagctgaccggactggatggagttatcaaacgatgcatcccaacgcgggttggtgagggcggccttgttgtcgatcagctgctggtagacatcggccacggccttggagcccttagtctgggtgttgacaacccaggagttgccgtcgaccttgtaccacggaccggaagcgccggcctggccggacatcatcatcatggcctcatcaggttggaaggtcatgatgtacttgccttgggcagcggtcttcttggcggtctcaatgagctcgtcagcggtcttcggcacggtgatgccgagcttctcaaattcagcggcgttgtagaagtaagtcagcgggccggtgtcctgcggcagaccgtaggtcttgccgtccacctgcatcagtgcgaacgggacggaagcgaaatcgtccttgtacttggcggcctcatcggtgacatcctgcagaaggcccttggtgaagacctcaggaacctcggcgtaaccgacctgagccagatccggcgcattgccagccttgacgtcggtctcgagcttcttgatcatgtcggcggcattgccatcgaacttggtggccttgacctgaatgttcgggtgctccttgttccacttggccacaatgtcgttgaccaaggtcatgccttcgcgatcggccagacgatgcatataggtgatgttgaccacaccgccatcgctgccgggcttcgtgtcgccggcagtgtcgctgccgccgcaaccggccaaaccaatacccattgctgctaccgcggcaagagcagccacgatgcgcttgttgtgcgataccatatctctactccttcctagtgaaatcatcacctcagcgtgatgactgattgctaatttaggcctttgctcttttattgtcaacttagctaacaattaccgcgcgtcccgttgaggtgagtggcattaaaccgattcgatgctcgattgtgcgggtttgttcatttcattaactccccttacaaagcaacgtacttttggtccaccggtagacctaatgagatattggatagcggcaacaatccaagacgttagcttgcaatcgtccaccacaaattgcaagcacttgccaacattatcggttttcaggttgccggcgcgatacccgactagggggcaccgcgccttaatgagacgctacacgagcagtctcagcaactggtagagctgccacaggctacgcacgttgaagtgcgtgccgtcaaccgtggcgttcgcctcgccatcgcccacatggacgatcacggtgcgcccgttcacggtcagactaccgtgcatcgtgatatgattcatcttgcaaccttgttgattaaaggcgcaagccggtaatcaacgcaaaggcccgatgctgcaaacgtcgggccttttcttatcggatcacgccgattggcccgtcatatcaacggggacaccgcatgttacggcatcacaaaccaatatatcagcaccccggtggcgatcaagaagacaggttccagaaaaagaaaaagggcctgggcatgttgcccaggcctcggttcgcggacagggcgagattcgaactcgcggagggttgcccctcaacggttttcaagaccgtctctttaggccgctcagacacctgtcctgatgcgcgttcacacgcgcaagtattcattatacagaagggagggatgttgatattcggcagtgcggtcggtcttggattcgcctgctggctattagcgatctctccctcagtcagctacgctgacagctcccccattaaagggagctaaagcacgatgagactcaggcctcccacttagtgggctcgatgacttccttgccgcccatgtaggcgcgcatggcctgcggaatctcgatggagccgtccttctgctggtggttctccatgatggcgaccagccaacgggtggtggccaacgtgccgttcagggtggagaccgggcgggtgccgccatcttccatacgctcgcggatgttcagacggcgagcctggtactcggtgcagttcgaggtggaggtgagctcgcggtagcggccctgggtcgggacccaggcctcgcagtcgaacttgcgggcggcggaggagccgaggtcgccggctgcggtgtcgatgatgcggtagggcacttcgaccttggcgagcatctcctgctccatggccagcaggtgctcgtgctccttgtaggagtcctcctgcttggcgtagacgaacatctccaccttgtcgaactggtggacgcggatgatgccggaagtgtccttgcctgcggcgccggcctcgcggcggtagcaggaggaccaaccgcagtagcgcagcgggccgttgccgaggtcgaggatctcgttctcgtgcatgccggcgagcgccacttcggaagtgccgaccaggtactggtcgtcgggctcgcgcagacggtagatctcgtcggcgtgggagttcaggaagccggtgccgcgcatgacctcggggcgcaccagcgtcggggtgatggccagcgtgaagccgtgctcctcggcctggtccacggccatggtgagcatggcgatctgcatacgggccacctggccacgcaggaagtagaagcgggagccgccgaccttgacgccgcggcgcatgtcgatgccggccacgccggtgccgagggtcaggtggtccttgggctcgaagccttcggccgcgaagtcgcgaatctggccaaccttcttgacgaccacgtagtcgtcctcgccgccttcgggagcttcgggctccacgatgttggagagcttccacatggcggtggtgtattcctcggcggcggaatcggccttggacttgtattcggagaccttctgggacagttccttggtctcggcgatgagcttggccttctcgtccgccggggcggaggcgaccttcttgccgatttccttctgctgggcgcgagcctcttcgaaggccttcagcgccccacgacgtgcggtgtcggaggagagcacttcgtcgacgagttccacggactcgccgcgcttgcgctgggattccttgacgatatcggtgtgttcacggatgaattgaatatcaagcatgggcaccagactagccgcgtaagcagacaccgacaatggccgaatgcgcgggagtcacgcggaaatcacagggaagccagggaaagtccgcggacgggtccacccggccaatttcgtcagatgagacgcgattgaaccataatcgcgccccacggggctgttgcgtgcaggaaatgttcacgtacggcgcaccatggccgcaaacgacctccccaccgataacaataggagccatgcctcagcctgccctcaccgtgtttctgatcatcgccgcaatcgccattgtggtggtgctcatcgccgtcatcgtcatcgctctgcgcgcgcagcgccgccgcaagctggctcagacgctggagaagcgccgggacgacgaggtgcagtacgccttcatcgtgaatccgtccaaaccgcaggccgaagcccgccggctgcatatccagaggttctgcgaggccaaggggctcaatcgcatccgcttctacgacacccagcttgacaaggacggcagggtctgcgcgcttgaggcgctggaggacggcgccgacgtggtgatcgcggtcggcggcgacggcacggtacgcacggtggcgagcgccgtctccggcaccggccatgcgctgggcatcatccccatcggcaccggcaacctgtttgcccgcaatatgggcgttcccgtggacgatatcgacgccgcgctgaccgtggccacctcccacggctcccgcctggtggacatgggccgtctcactctgctcgactacccggaggacgaccacggccacgccttcctcatcatcgccggcatcggcttcgatgcggccatgatcgacgacaccaaccccgagctcaaggcgaacatcagctggctcgcctacttcgtgggcggcgtgaagaacctgttcgcgccgaagttccgcggcacgctgacagtcaccagcgccgacggctcgacccacaccatcaagaatctcgatttccgcacggtgatggccggcaactgcggccagattcccatgttctcgctgatgccggcggcatcctatgacgatggtctgctggacttcgaaatcatcgacaccaccggcggcatcctcggctgggccaacctgttcggcgacgtggtgcaccagacgatcatcggcaagcccgaacagaacccgctgtccacgaactcgaccatcgaacaggtccagggtgtcagtgccgaaatcacattggaaaagccggccaaagcgcaggtggacggtgacatgctgccggaaacccgccacatccgtttctcggtggatcaccgcgcgctgatcgtgcgcgtgcccgacgcctccgcgctggaaaagaccgcgcaggccgctgcttcaaatgccacctcgaatttcgccgaaatgaccggtacactcgagccgattcgctgattcgccaatccgctaatccgttactacgatgcgtggccggtgactcgggcgacatgcatcgccaaataagcgatttcgtcgtcgctgatatccgtgtcgaggcgcagttcgagcagggaggcgatggttcgcgcgcatcgcagcgcagcggggtaggactcacgaatcaccttcatcaccggtgccggctcgtccgtcagttgctggtgctggtggatgcgtacgaacaggtaacgcagatgggtgatgaacctgcccacattcacggaactgcggtccaacgtgatgccgtagctgtggtcgataatgtcaagcagttgctggatcacgcccgtcatcgtatacgtataggacaggtcgccggtggcgaagccggcgttgaccagatgcatggcaagcgcggtggcctcgccgtccggcagcgtgacgtcgagccgcgcattgagcgatgcgagcatcgcacgcccctgcgcgtattcctgcgggtacaggttgctcacctcgccgagcagcgggtaggtgatgtcgatgccgcgccgcacccgctccaccgcattcgccacgtgatccgacaaggccatgaccagcgtggtgctgccggtctcacgctcccccagtccggcttcctgcatggattcgacgaccacgcggatgatttcgggcggaatgtccgccagcatctgcgccagatggtccgggtcacgcccgtccgacggcacgaaggtgcgcacgactttcgactcgtcgaccgtctgccccggcttggcctggaaccccagtccacggccggtgagaatcacctcaccgccgtcgccgcctttggcgagcacgacgttgttgttgaacactcgcagtatttccatggcatcctttcgcaacgtcattgttccacatcgatgatcgggctgccggctgatacggttttgcagtcaccgccgttgttgtcgccgctaccgtcgccgatcaacggcgtgaccacggtcagttcagcggcgttgaccaccgtcaccaccaccacaacgctgtgcccggccgccgcgactttgccgaaatccacggtggccagtggctctcccgccgcgatccgctcgcctttagccacgaccacagcgaatccctcgccatccatatcgacggtgtcaatgccgatatgaaccagcacctcgatgccgccatcggttttaatgccgaaggcatggccggttcgggccacggttttcagcatgccactgaccggtgcgagcacggctgtctcaccggtcgtctccggcacgacgcctacgccctcccccagcgcgcgggaggcgaacaccggatcgccagtcgcttccagattcaccagccggccggcgaccggcgacaagatggcgttggagccaagagcccgatcaggggcagcccgcgatggagaatcttccgcagactccacatccgacacggtcgtgtcaatccccctcgccatatcctgcgggcgtgcgttctcgcccgccgagaccatctgcgcctccgtggcgcgcggcggcgtacggtacccgaacagcaccgtcagcaccatcgccattacaaacgcaacggcgatggacagcgcgtacacccacatccgatcgaacaccggaatcgtcagcaacgaggagaaggcgaatgccgtagtcgtaacgccccggaccatctggccggatggcagcacggacgggaacagccagccgaacaccgcgctggtcactccgccggccgcgcagccggcgagcagccagcggtagacgcggcggtgatgcagatggatgccgtacaggctcagttccgaaacgccacccagcaatcccgcgagcaacgcccccaccgcggtctgccgcatggccgaatccttgccgcgtacggccagcacgagtacgccggcggtggcaccgaagcaagcgaagttccatacacccatcggaccttggacgaagtcgtagccgagcgtctgaatgttcatcagtatcagggcgttcaacgaccagtgcagaccgagcggcacgagaaacgggtagagcatcgggatgatgagcgcgaacaggaatggcacgtgcgcgttaagccatgctgtggccgctcccagcccgctgccgagccatattcccagaggcccgataaccagtatggtgagcgcaaaaacgacgaccagtgagaggaatggcacgaacaccagctgtacgctgtcgggaatgacgcgcttcagcccgcggtagaccacggcgagcacggcggccatgagcaatggtacgaagatgttgccactgtagtcgttgagttgaatcggtatgccgaacgccgacacggtgcaggtttcggtgccgaatgtggcggtggccgagcattgaatctccccggagagagcgctggatacggacgtcccggacattccggacatcacgccagtaagctgcggggtcataagcgcggccataatcgcaccgccgagccaagggtcgacgtccagtttcttggccgcattgtaagcgatcataatcggcagaacggtgaacacaccctcccaaatcgccttgagtagtatccaaccggtggacgtctcgccatcaggcacaatgccgagtgcaacgatcacgttgacgatggcgatgaccagcgaggcaccgagtagcacgcccagaatcgggcggaacgagtcggacaggtagtcgaaaaacgcggcagcccgggcacgggcggcactgccccactcgcggatggtacgaggcatgaagtgacgggatgtattggctgggccgtgactctgctcggtgtcggtatcgcgcaatggtgtgacgtcgtcggaaaggttcggcgcggactgcgtaggctgcgtaggctgagtggattgcgttgactgagtggattgcgttgactgagtggattgcgttgactgagtggattgcgcggactgcgttggccgcgacgccgccgatggtaattgcgttgccggagtcaatcgcgctgcctgcatccgaacgatctgctcgtacaccgaggcgaccgctccgccgatgatgacctgataacgattgccggttcgcgggaatgcgccgaggactccggggatggattcgagaccgtgctggctgacctggccggcgtcgtccagttcgaagtgcagtcgcgtggcgcaatgggtcaggttggtgatgttcgcggagccgccgacggcatcaacgatgcacgccgcaatcactgcaggcgttgcgttcgatgcgttcgccacggttcctccttgctgccgtatgccactgtgttccattatcggcgctgggtgccccaaaagcacggcaatgccggcaaagcatcgcgaaacggcaactatgcgctacggtgctccgcgatagcgttccgctatggtgttccgccgcacccgttctccgtatttgccgcagcgcccattccgacttcattccaccatgcagaatcctgcaatcgttgtcaaaaatcatcgttttttgccgcctattcggagtgtcgcgaccgagaaagtcgtatcctatctttcacacacgttgcgtagcagggttgttactcaaaatgaggcaagacctggagtgacgtggaatttgcgtatcgtaatatgcgaattccacgttgttccaggtcttttttgttttcgggcgacttcaggcaatcgaagcctgaccttgcatgcggcagaggggccacgcggcaggcgcggcccgtcaacggcgaaaggacaaggcaatgacgacgacggcatcacccgtatcgaagcagacggcatccgcggcacaggagaccggcgcaaccggtgcagcggccaccgcaatcgaaaccatcgaaaccggcgtggccggggtggcggacgcggccacaaacgcggcagcaaacgcaatcgaggacctcgaagccgccgaatcacgcggcttctccacgcgcttcccgctcaacagcgcattcatcttcaccttcggcgcgctcggcggcatgctgttcggtttcgacaccggcattatctccggcgcctccccgcttatcgaatcagacttcggcctgagcgtctcccagaccggcttcatcacctcctcggtgctgatcggctcgtgcgcaggcgcgctgtcgatcggcgcactgtctgaccggttcggccgcaagaagctgctcatcgtctccgcgctgctgttcctgctcggctcaggcctgtgcgcctcctccaccggattcgcgatgatggtgtgcgcccgcatcatcctgggtctcgccgtcggcgcggcctccgccctgaccccggcgtacttggccgaactggcgccgaaggagcgtcgcggctcactgtccacgctgttccagctcatggtcaccttcggcattctgctggcctacgcctccaacctcggattcctgaaccacaacctcttcggcatccgcgactggcgctggatgctcggttcggcgctggtgccggccgccttgttgctgctcggcggcctgttgctgcccgaatccccgcgttatctggtgaacaagggcgacacccgcaacgccttcaaagtgcttacgctgattcgcaaggacgtggatcagacccaggtgcagattgagctggacgagatcaaggccgtggccgcacaggacaccaagggtggtgtgcgcgaactgttccgtatcgctcgtccggcgctggtggccgccatcggtatcatgctgttccagcagctcgtgggcatcaactcggtgatctacttcctgccgcaggtgttcatcaagggcttcggcttccctgaaggcgacgcgatctgggtgtcggtgggcatcggcgtggtgaacttcgtgagcaccatcgtggccacgcttatcatggatcgtttcccgcgcaagggcatgctgatcttcggttccatcgtgatgaccgtttcgctcgcggtgctcgccgtgatgaacttcgtgggcgacgtggccgtgctggcagtgccgacgatgattctcatcgctttctatatcctcggctttgcggtctcgtggggcccgatcgcctgggtgcttatcggcgagatcttcccgctgagcgtgcgcggcatcggctcatccttcggctcggcggcgaactggctgggcaacttcatcgtctcccagttcttcctcgtgctgctcgatgcgttcggcaacaatgtgggcggcccgttcgcgattttcggcgtgttctcggccctgtccatcccgttcgtgctgcgcttggtgcccgagaccaagggcaagtcgctggaggaaatcgagaaggaaatgaccaagcgctagacaaccggcacacgattcgcacaaaagttgacaactcttaacataagagtacccaaagtggcgaaaaacgtggcagaatagggaacatggtagcaaacaatgcgggtcagcccgccaccccagcagatctgatcaatgtcgatgaggttatcggcaaatactatgacctcgtccccgatcccgaagtccccgagcagcgtgtcatcttcggcacctccggtcaccgcggatcgtccctgaagacctcgttcaacgaggcccacatcatcgccatctcccaggccatcgccgaataccgcaagaaggccggcgtcaccggcccgctgtacctcggctccgacacccacgcgctgtccggcccggccaagaagaccgccatcgaggtgctcgtcgccaacggcgtgcacgtgcgcgtcgattcccgtgacgacttcgtgcccaccccggtggtctcccaggccatcctgacccacaaccgtgcggccgacggcacccagcgcttcgagggcgagggcctcgccgacggcatcgtcgtcacgccgtcccacaacccgcccaccgacggtggcttcaagtacgaccccgtcaccggcggcccggctccggccgagaccaccaatgccatcgccgctcgcgccaacgagctgctcggcaacttcaagtccatcaagcgtgtgccctacgaggaggccatcaagtccgagtacgtcgagggcttcgacttccgcgagcactacgtggacgacctggagaacgtcatcgacttcgacgtgatccgcaactccggcgtgcgtctgggcatcgatccgctcggcggcgcttccgtgaactactggccgctcatcaacgagaagtacggcctgaacatcggcgtggtgcgtcctgaggtcgacccgacctggcgcttcatgaccatcgaccacgacggcaagatccgcatggacccgtcttccccgtacgccatgaagggcctggtcgacgagctcaacgccggcgcttgggacaagtacgatctggtcggcggcaccgacccggacgccgaccgtcacggcatcgtctgcccgaactggggcgtgatgaacccgaaccactacatcgccgtgtgcgtggagtacctgttcggcggcaaccgtccgggctggcctgagggcgcagccgtgggcaagacgctggtctcctcttccctgatcgaccgcgtggccgcatcgatcaacgcgaaggtcatcgaagtgccggtgggcttcaagtggttcgtggacccgctgttcagcggcgaagtcgccttcggcggcgaggagagctccggcatgagcttcctgcgcaaggacggccgcgtgtggaccaccgataaggatggtctgatccccgacctgctggccgccgagatcaccgccaagaccggcaagaacccggcccagcttcaccaggagcaggtcgagcgcttcggcgagtcttggtacaagcgcgtcgacaccccgaccacgctggagcagaaggccaagttcgcggcactgtccggcgacgacgtgaccgcctccaccctggctggcgaagacatcaccgccaagctgaccgaggcaccgggcaaccacgccaagatcggcggtctgaaggtcaccaccaaggacaactggttcgccgcccgcccctccggcaccgagaacatctacaaggtgtacgccgagtccttcgtctcccccgaggctctggacaaggtactcgacgaggccaccgtcgtggtcgacaaggccctgagcgagtgaaatcgctgcgttagccgcgttcacagcaactaataaggctctgcattggattcatgcaatccactgcagagcttttttagcgcatatgcagttcgcgaccactgaaacacgcaggtcaacggttctcctcatgcaccgtgactgcattttctcaacatcactgcagggcaggacggccagatgaccgcgaaacgttcgcctgcctaccatcatcattgtggggtcacagcggccagatgaccgccgaagcgttcggtcggcttgcatcatggtcgagttttaacatcgttgtgggacgccacgacgaatttgcccattccagagttgccatcccacaaaagcgtgggacaacagctaagtcaatcgttttacattttcccccatcccacacactcaaactggaaaccccggaaagacgccattcctgccacacccgtcacagccattacccgaggggccgtgggacgccacgcaaaaatcggcaaaacacgcgtagcgtcccacacccattggcgcaaatccacgctcaatgcaccgacaacacccccaatcgaccactatgacacatttccctccacaatcgaacactagtcattcacgaaatccatcactacgaggcatcgcaatcgaacggcatgcaatatcaagcacacaccacaacaacaggtcgtacaaatattgcctttacatcagtccgtttcgaacatcatggtcacagcaggctctgcgccaactcttcaagagacatggcaactacatgaaactcgaatacggcaccgcgcgaagcaagcgccctcgccacgttgaaagcgaattcagcacgagtatcctcgttagcgatacttgccgccgtggcgatgaagaccagccatctccgcccgaccagcatgccccttttctcttggtcacggcgccattgagtcttactcgtacgatgatgatcgccatcatattcaacagcgaccttgaactctggccacgctaagtccaacgttatgggagctccagatgcaaaagccgcgtccggcaccacatagttcgcaaccggctgtggaatcccatgcgctaccagagagagtcgttcttctgattctttgggcgaatcagcaccaggtgatatcagaggcaatgctcgaacgcaggacgggcgccctctgaatcgggtaaattgctccacgaacctcaccagatcctgatagattgcagcagcatcacgatccttggccaatactggctgtttgctcgtagcagcgatgacggcatccccgagcacaatcagggactcaaaagaaacatacggggcaagttgggcccatacgtgaaacaggtccagcgcaaacacgtgttggttcatttccacattggcggctttagccgcatgtttccaaatatgcgtttgcagtggtgcatggcgtgtacgaaaccgcttgctcttaacgctggatacagtgtgcagcttggccgagtcgaggtcgcaatcggcgggaatcggtacggattgcagagcgagggaagtggtcatgccgaaaagcagcttcttgcccgcccgtttcgcttcctcagtgcagcgtgcgaccatgtcgcgtttgcgctgggcgaggctttcgctcatggtcggtgtcgccgcagaatcatgtgcaccactgttcggcgatgacgagtcgcgagaagtcgggtatttcgagtcagcagaaaatgaccccgcaaattcaggcggaacaaaaaccgcctccgattcttccggaggctgatcgtatatagagcctggcagagctccatagttggtgatgccgtcggtcatcctgttcatgacaccaccatatgggtagtgggtgcggaaacggaagccgatccgaggtatgtggtcctagcttcacttacgcacattcattgtggataaccatgtggacacctcacttatacacatagtcatccacctcttcaaccccgatttgacacactaactgtatctgatatgattacagtatcataactgtacacatcatagttacagtatcgactcggcaaggaggtcgtttcatgaacggcgaccattcactggcagtgcacgcattggtctaccttgaccatcgcgccacacacctgcccagtcagatcctggccgagaacatatgtaccaatgcggcgcgcgtgcgcaaagtaatgcgaccgctcgcctcagccggactcatcgccactaaagagggtgctgaaggcgggtacgctctggcccggcccgccgccgaaatcactttgcgcgcggtagcggaagccaccggcaccacttttgtgaaagtgaactggacaccgggcgacgtacacgaggactgtctggtgtcatcttcaatgggcgcagtgatgaacgacatctatgccgggctcaaccgcacttgcctcgaacaactcgaacacaccaccatccacgacatcaccgaacagatattcagcgagcgcaaaggctaataatcccgcgcgtttcccctagccagcatcagtcgataacgcttcggcagtcaaagaagaaaacagacgccgcacggcacacaacacatcagcacaacgcactcttatcactcgaatacgtaaggaagtaaccatgtccatcagcacacccaatgccatcagcacacccagcacctcccccactatcaccaccgacgccctgatcattggattcggcaagggcggcaaaaccttggctgccaagctcagtgcagccggccgcaaggtcgtcgtcgccgaggcaagcgccgacatgtacggcggcacctgcatcaatatcggatgcttgccgtccaagtcactgattttgtccgccgaacaggcgcggcgggatggcgcgaacagtactcccgaaacccgcgaagcagcgttcgaggctgctatcaaggagaagcgccgcgtcacttcgatgctgcgcgacaagaactatcacaagctcgccgaccaagacaacatcaccgtaatcaccggccgcgctcacttcaccggccctcatagcgtggaaatcgccaccgctgagggcccggtcgccgtgaccgccagcaagatcttcatcaataccggtgccacgccgcgcattccggatattcccggtatccacactacgcccggcgtctacaccagcactggactgatggatctcgacgatatgccgcagcgactggtgattatcggttcaggattcattggacttgagtttgcctcgatgtttgccgatttcggcacggcggttaccgtgctgcagcacaatgccgagttcctgccgcgcgaggatgcggatgtggcggccgcgattcgcgcacagttggaagcgcagggcgtcaagttcctgttcaacgcggataccaaggccatcgcgcctgctgctgacggcggcgtcaggttgtccgttgcggtgaagggtatgactcgcggcgcatcgcaagcttgcgattccacccccgccggcaccgggaacgctcataccgatatcaccggcgccaccgacactacaacaaccaccagccccactagcaacccgaccgatcacgccacgatgtcacacgttcaaacgaaaccatcagacgatggcgagccgcggttcgccgagccggctgaagcccgattctgcctgaccaccgacgcggtactggtggccaccggacgtacgccgaacgtcgagggactgcatcttgaggcagctggcgtggagctcaccgaacgcggtgccgtgaaagtcgacgagcttctgcgcaccacagcagccgacatttgggctctgggcgatgtgaacggcggcccgcagcacacgtacatttcgctggatgactatcgcgtggtgtggtcgcagctcaatggttccgaccgtccgtacacggtgaaggaccgcaagcatgtgccgtcgagcacattcctcgccacgccttactcgcgcgtgggattgaatgagcgcgaggcgaaggcggctggattggattatgtggtcaagcgattgccggtggccgctgtgccgaaggcccaggtaatgcggcgaccggatggtctgatgaaggcgattgtggaacgcaatactggccgcattctgggtgcgatgctgctttccgtcgagtcgcacgaggtgatcaatatcgtcaagttggcgatggatcttgacgcgccggccagcacgttgcgcgatatggtgttcacgcatccgacgattgccgaggcactgaacgacttgttcgcgtagtttgttcgcatagcacgcccgcgcagcatgacccgcgtagcgcagcccgcaacagactcccctaatgcgcgcgaaggtcctcatcgacgtaaaccgatgaggaccttcgcgctgtcgtcatgatccgtacgtgacagcaatcacgtccgaaccagccgttacttcaagccgagcttacggtccagaatgtcggaggcatccaatcctaagcggcgtcggatgaaccagccaagaccgagcggcaggccgggagccaaggccatgccgcctggaccgagtgccacggttttggagttgcctgcgataagcatggtgcccttggatgcggccgtggaggtcgaaccatcgctgtccgcctctggtttgaggatttcgatgttgccgtcactggttttgtacagtcccttattctcattccagataccggatgcgccattgttgccggcctcacccgcagagaggaaatgtcttgtttttcttgtgagcgctcacctattcacgcgcgatggcatgtttttcaagcaaagtcaataggtgtgatgttattcacactcttcactacgttgttttgcctcgcactgggcagccccacttcagcaagagattgcacagcttgcgttagggtggagaacatgactatcacagtatccacagatgggtccgcattagggaatccaaacgggccaatgggctgggcctgggccgatcatgagcagaacgccggcggcaagcccggccataagcacgacgaccatggttatgatgcgggcggcgcgaccaacggcaccaaccagattggcgaactgtgcgcagtgttggaagctttgcgagcgcatccgggccctgagccattgctcatcgaatcggattcgcaatacgccatcaattgctcgaccaagtgggtcaaaggctggaagaagaacggctggaaaaattcacagaaaaaacctgtgaagaacaaagagcttattcaggcgatcgaccgcgaaatctcacaacgccctggcccggtggatttccgatgggtcaaaggtcacgccggcaacgaaggcaatgagctggtcgatgaactggcacgcacctatgcgggcgattgccgttcgggtgcgcgcgacggctatctaccgattgaaggctggcagtcgctgctgggctccgaatacgcacatggcaccgatgtgcctccagacgtgcaattggtattggacggcaaagcggatgcggcaagtttgcgcaagccggctgcggcgacggatcagacggatgccgcaaggccggagaccaagtcttcgtcacccttagcggcacaatcaacgcaacctgtacaatcaacgcaacctgtacaatcaacacaacccgtacaatcaacacaacccgtaccccccgcaaagcccagtgggctgacggtatccggtacgctgaccttctcccccgcgccgaaaacgagcccgtatttcaacgggcagccgatgccgatcaaaggcagcatcgaaatcgaaggctatgtggacggcgacggcaacctgaccatcaccaacgcaccattcgtacgacactgacacccaaacacacgaatatgtaccgcaatcggacacgatgacacaaaatcgctcattcgcgttaggataggagataaggcttcacgccgttgatccgtgcggcggaggcaaggatggcaaaggagaaaccatggataaggcacagcaggatgcgctgaagaaggcggccggcatcgaagccgccaagctcgttgaaaacggcatgatcgcaggcctcggcactggttcgaccgtgaagttcctggtggacgagctcggccgccgtcatcaggaggaaggtcttgagttcactggcgtgaccacgtctcgccgcacgcaggcccaggccgagagctacggcatcaagatcgtggacatcgacgacgtggaccacatcgacgtgaccattgacggcgccgacgaagtcgacaagaacttcaacggcatcaagggcggcggcgctgctctgctgtgggagaagatcgtggccaccaactccaaccagatcgtgtggatcgtggacgagtccaaggttgtggacaccatcggcaagttcccgctgccggtcgaggtcattccgttcggtgccggccaagtcatcaagaagttcgaggcccgcggctacaagccggtgcttcgtcttgacgccgacggcaaggaagtgcgcaccgacgagaacaacttcgtggtggacctgcacctggagcgcatcgatcacccgcaggagctggccgaagacctcatcaacacggtcggcgtggtggagcacggcctgttcctcaacatggtcgacaaggtcatcgtcggcgacccgaacggcccgcgcgtgatgaccaacgccaacaagtgatcgtctcacatcactaagcttttccaagcccgcatctgcacatcgcaggtgcgggctttactgttgcccgaacaaggcaaagagccaagcaaaagagaaaccccgcgaccataacgatcacggggtttctaatgccttgattgcaggtaagactacttacgctggtggcgggtcttacgcagcagtttgcggtgcttcttcttgctcatccgcttgcggcgcttcttgatgacagaacccatctgaagcctccatttcgattaatcgtaaaagttgcaactcgcaccataatacacgtgttgccagacagagggaaccagtatgttgccgatagtccgcatatgccctgaacgcagttggggcatccacatcagcaatgtggatgccccaacgttcataagtttgtgcagcagctgacagccgatactagatgctacatcgggaacttctggtagaagcgatcgaccgcttccttggtgccggtagcttggaagaccacggtatcgttctgccagatggcaacggcgttcttgctgttggaggcatcggccttcaccacgtacgcgcccgtgacgttgccggaaaccttgacgttgccggatgccgactcatcgccggtctgcgcagcgaccaacgcatcgtactgggtcttggcattgtccgccgacgaccactgcgcggcgaccagcgtgacatccttggcggcatcaccagtggagtaggtcagagtgtactcctcgagcggcgacgcggaattccacgtcgtggaggcatccgccttggtacgcgcgtaattcagcacgctgcccggcatggccttcaacagctcactggcatcatccggcaaagctgtggcgtcgatggtcggcttggtcggctcggatgattcggttttctgctggctgttttgggtggtagtggaggtgccatcattcttctggatggcccaacccggccacacaaaggccgaaagcactgccaggataatcacaacagctgcggcaaccaccactgcaatcaacttgccatgggattgcgtggtcgaggagttctcactattagtcatgccccgattctctcacagccgcgtgacgctaggcggccgtaattttagtcgttgtgcgcaagccgcgtgaaactcttgtgaacggtaaaaatttaccgtccgctggtgtttgggttagggtgagaccatggcgaaatcaagtgtgcagtatgtatgttccgaatgcggttggaacgggccgaagtggtacggccgttgccccgagtgtggtcagtggggcacggtcgaggaatttcacgaggctcggccggcggcaggctctcgcacggccgctcccggccgaacatcacgcacgcagtcggttacggttgccaacaacgccagatctgcagcccgtccgattaccgaagtgggcacggaaagcgtcgagcggctcggtaccgggttttccgaattcgaccgtgtgctcggcggtggcgtggtgccgggttcagtaacgctgatagcgggcgaaccgggtatcggcaagtcgacattgctgttgcagacggccggcaatatcgcgcgcgttgtggcgggagacagtacgttccgaggggcaggtcagcggtctgcccaacagtcgggccgagcgcagggcggcacatcaaacacggtgccgatgcggggcaacgcatcatcaacacacgccaacaccgtgctgtacatttccggcgaggaatcacaggcgcaggttcgtttgcgcgcttcccgcatcaatgcggtggagccgaacttgttactggcctccaccaccgacctatccacagtattggggctgatcgaacagaacaagccggccttggccattgtggattcggcgcaaaccatcgtctcgcaggaggtcgatggcatttccggcggttcgactcaggtgcgcgaagtggcaagcgcgctgatagataccgctaagacgcttgacattccggtatttctggttggtcatgtgaccaaggacggttcgattgcaggcccgcgcacattggagcatctggtcgatgtggtctgccaattcgaaggcgacagcgagaccgcgctgagaatgctgcgagcggtgaagaatcgttttggcccgaccgatgaagtcggctgtttcgacatgagcggtgaaggcatcgaagaggtcaccgatcccgccggattgttcctgtctggagacggccctgatgcggccaacgcggcacccgtggaaggcacctgcgtgacgttcacattggatgggcatcgcagtctgcctatcgaagtacaggctctggtcaccacgtcggtgctgcccacaccccgtcgtgcggtcaatggcgtggaccccagccgtatcgccatgctggtcgcggtgctctaccgtcacagcaagctcaacctgctgtccaacgacctgtatatctccactattgccgggggccaggccaaggagcccggttccgacttggcgatagtggcggcactggcgagcgccgccacgtcaaaacccattgcgcgagccacgtgcgccattggtgagatttccctgaccggtcaggtgcgcccggtaccgcgtatggaatatcgccttcgcgaggccgcacgcctcggcttcaccacggcggtcattccgccactgcgcaagccggtgcatgtcgagggacttcagctggtggagtccaacacattgtccgacgcattagacgccttgggagtgcgtaaatagccctgagatatgcctcaggcggtaagacgcttggtctcctcgacgttgcgcttgagttcgtcgacgagttggtcggggccatcaaacttgacctgcgggcgcaggaagccgacgaattcgacgcgaaccttgtggtcgtacaggtcgatccattcttcagtgatgcagtaggcctccaccacacgctcattaaggccggttttttcactgaaggtgggtttggtgccaatggagatggcggcgggccaacggttttcaccatctaccagccaaccggcatagacgccgtcgaccggaatgtagcctgcaatgtcggagccaagattggcggtggggaatccgatggtgcggccacgctcctcaccatgcaccacttcgccctcgatggagtgcggagcacccagaatggcgttggcgtcctggattcggccatgagccagcaggtagcgcacattggtggagctccatgcgcgcattgccttggcctggttcttcttgctccatgcgcggcgctcggctttggtggcattggccagcggatcgacgggctctccccattcgctcggggcttccggcttgaaatcgcgcggaatacgcacttcacccgggccacggtcatcgaccacgtcaagttcgaatacaccggtggcggcggcaagattggcgatatgcttcacatcaccttctcgccccttgcccatggcggcatcctgcccaaggaccaacgtgcgcatacccagcttgccggtgagtctgccaaggaagaaaatgtatgacatggctgcgaaggccagcgtgtagtgcaccaccaacacatggtccacgccgaactgttccatgcggtgcagtcgatcatccacactggtcaatgcttcggcatccacgttctgaaccgcgggctcttcgccatggtgcgagatgacccagccgtgcacgaatgcggggcgcgggtcaaacagaatcaccacggaaaaagcatcatgctggtgcgcgagttccaccacacgcttgatcaccgcctgatgacccaagtgcatgccatcaaatgcgcccaatgtcaccacggccttcttatcgttactgaacgagggccattcaatcgaaccttcggcgtcaggggtcaggtgcgtgatatccatcagtgtgctgttccttttatccgtgcgatgttattcatgcaatatagacgttgttgtgcgcggcctgtatcaagctgcacttttcaccgcgtctactttacgcgagggggaatacggtgaccggcttggcctgatgagcgtttgcacgctcgataatcgccgccacatcatgcgtttgcggcacaatggcggcagtgggctcgctgattgtacgctcaatacggcggccgaagcgtaattcgctggcctcctcaggagtgatgtcaagcgccggcatcgcacctcgagcggcctgttccatggtgagggcatggtcaagcagccagttgcggcgctcgtcaccggcaagaccttcaggagtgtccaatacgcacttgttgcgcgtgacggtttgcccttcccgattagtgaacgtcttctgatcggtatgtgcggtgacggtatgggttcgcgtgtcaagcatcgcctcaggagcgataagtccgctggcatcgtccggcaacgcgaatcggccgactcgcgtacggcgcaaacgggtcaggtatccgccgacgccaagttctttgccgaggtcgcgggcgagcgcacggatataggtgcccgatgaacagctgatccgcacgtcaacatcaagtgcgggaatcgctcccgtgttcgcgtcttcccgcaatggttcagcggtctgctcccctgctacgaatccgctgcggatatccagcacggtgaattcgctgatggtgaccgggcggggtttgagttccacatccttgccttcgcgagccaagtcgtaggcacgctggccgttgattttgatggcggagaacgtattggggacttgttcgatatcgccggtgaaattggtggcgatggtgcgtgtgagcaggtcttgccatgaggcagttggtaacgccgttggttcgccgctctggccaccctcagtcagctgcgctgatagcgtttgccagcgggagcgggcttcgtcatcgacaagcacctcgccttcggcatcgtcggtagtggtgcgcaggccgaggcgtatggtagcctcgtaggttttgtcatgcgccacgatggcgttgagcagtcgtgtggcgtggccgaaggcgatgaccagcgtgccagtggccatggggtcaagggtgccggcgtgaccgaccttcttgatgtgcaacgcgccgcgcacggcggcgacggcgtcgaagctggtcacgccttgcggcttgtcgatgatgagtaggccgctgggtgttgtatgaagcacactactcctcgtcggactcgaactcatcgccctcggcttcggcctcgtcgtcgtgcttgtacggatcggcgtcgccggcgtactgggcggtggcgcgggcgcgggcgagttcttcgtcacgcttcttggccacggcgagtatgtcttcgatctcgtgagcctcgccgggcacttcatcgaacacgaattggagctgcggagtcaggcgcaggccagccttgtggcccaccagagaacgcaggtggcccttggtctgatcgagtgcctgctgggcgcgcttgcgttcgccttcctcgtggccttcgtggccgagctgggtccagtagaccttggcgatctgcagatcgttggtcacacgaacttcggtgacggtgatgctggcgagtcgcttgtcatgcagttcgcgctcaatggaggaggcgacgacacgctgaatcaaggccgcaatacgtgcggcgcgcgggttggttcctgccataggaatttccttttctagacttgagccccctctgacgaggggctgccgaacgcagtgaggctgggggagagaaaatcatggaactaccatgtctctcccccagtcagtctgcggctgacagccccctcgtcagagggggcttaacaatgactacttgcgctcgacttcccgcatctcgaaggtctcgatgatgtcgccgagttcaatgtcgttgaaggtgccgaggttgataccagcctcgtagccttccttgacggactgaacgtcgtccttgaagcgacgcagcgaggagatctcgaggtcgttgaccgtggccacgccgttgcgcaggatacggcacttcgtaccacgcttgacctcgccgtcctgcaccataacgccggcgatgttgccgaacttggaggagcggaagatctcgcggatctcggagtgagaggtgacgacctcttcgtattccggcttgagcatgcccttgagggatgcctcgatgtcttcgatcgcacggtagatgaccgagtagtacttgatctccacgccctcgcgctcggcgaggtccgcgacctgacggttcggacgcacgttgaaaccgatgataacggccttgtcgaccgtggccaggttgacatcattctgggtgatcgcaccgacgccgcggtggatgacctggatgccgacctcgtcggatacctcgatcttcatcaaggaatcctcgagcgcctcgacagaaccggacgaatcgcccttgatgacaatattgagcatgtcgatctcggactcggcgaacttcttcttgaagtcctcgagggagacgaccttgcgacgcttggccagctgggcggcacgctcggtggcctgacgcttctcggcaatctggcgagcggcacgatcatcggaggcgaccaggaagaggtcaccggcggtgggcacggaggtcaagcccagcacctgaacaggtgtggacggaccggccgcttccatcggctgaccgttctcgtcgagcatggcacgcacgcggccgtacgaagtgccggccacgatggcatcgcccacgtggagcgtaccctgctgaaccagcacagtggccacggcaccacgacccttgtcgagtcgggcttcgacggtggcaccacgggcgtccatgtcggggttggcgcggaggtccagctcagcgtcagccgtgagcagcacggcttcgagcagcttgtcgacgtgcaggttctgcttggcggagatgtcgacgaacatggtgtcgccaccatactcttcagggaccaagccgaactcggtgagctggccgcggaccttctccgggttggcaccgggcacatcgatcttgttgacggccacgacgatcggcaccttggcggcctgagcgtggttgatggcctcaacggtctggggcatcacaccatcgtcggcggcgaccacgaggatcgcgacgtcagtgagctcggcaccacgggcacgcatggcggtgaacgcctcgtggccaggggtatcgaggaaggtgatcttgcgcggttcgccttcaaggttcacggtgacctggtaggcaccgatgcgctgggtaatgccgccggcctcacgtgcgatgacgttggtcttgcggatggtatccagcagtcgtgtcttaccgtggtcgacgtggcccatgacggtaacgaccggcgggcgaggcttgagatcctcgtcatcctgcagttcttcctcgtcaaggttgatgtcgaactgctggagcagttccttgtcttcctcttctgcggagacgagctggatgttccagccgatctcttcgcccagaatctggaaggtctcctcatccaaggactgggtggcggtagccatctgacccaggtggaagagcacggtgaccagcgcggcctggttgacgttgatcttctccgcaagatcggccagggacgcaccctgacgcagacggatggtctggccgttgccgttggggatgcgaacgccgccgatggtcggtgctttcagctcctcatactcatggcgctttgccagacggttcttacgggcctttgaagacttgccgccctgacgtccgaatgcgcctgcggcaccgccgcgaccgccgcgaccgccgccacgtgcgggaccgttgctcggtgcaccgccgccctggaagttattgccgccgccttggcccccacggaagccgccgcgtgcgccgccctgaccggcaccctgggagccgccgccctgacccggacggttgtggccccactggccgggacgcggaccgccctgaccaccttggcccggacgaccgccacggaagccgcggccctgcccctggccttggccgggacggcccggacgaccgccacgaccgttatcagcagtcggacgagccatcggatgcggacgcggaatatcacccggcgtcggggtgtgcataccctgcttgcgggagaacgggttgttgcccgggcgcgggccctgagcgtgcgggcgcggaatcgcatttgaagcggcattgccgccattggcaccggcgccgccctgagcgtgcgggcgcggagccgaagcattgccgcggttgttctgatgctgaaccggctggccattgttcggacggccctggttgttacgacgatcgttgttacggcgatcgttcgggcgactctgacgaccgttctcacggccttcgcgattatcgcgaccattctcacggttgtcgttctgaccgtggcggccgggggtcggcatgccggggcgtgcgccgccctgcggacgcggtgtcggtgcacccggagtcggagcctgctgatgtgccgaggcaggcgatgcctgacgtgcgggagcggccggagccggtgcggaagatgaagtggaagccggggccgaaggtgcggccgggcggcgctgctgcacgggcttggaatcgcccttggcgttgtccttggcgaactctgccttcagacgccgggctaccggcggttcaatcgtagaagaagcggacttgacgaattctcccatgtccttaagcttctcaagcacggttttgctatcgacattcaaaaccttagccagttcgtatacgcgtggtttcgccactaattactcctattctgtgaccacgcgcgtgcatgggcgtggtcagttggtgatgacggcaagcctaccctgtctcatcgtgcgaccatgatcgtgttacctcgtctctggtgtgggcgatttcgcgcacactgcgccagcccacatacgccaatcaagcatactcatagcgctggatagcgtagacgcagcgagccgcgccattgctgacgcggctcgtatcaggaaataatgcgccctgaagatcattcgccttcgagcccggcggcctattcggcttccggagcagcagcctcggccgcagcctgggcgcccttttcggcggcgactttcttggcatgggcctcggcggattcgatgccgatcttccagccggtcagcttggctgccagtcgtgcgttctggccttccttgccgatggccaaggacagctggtcgtcgtggatgaaggcgatggcggtcttgttcttctcgctgatcacctgcacgccggtggccacagccggggacagcgcggctgccacgaacttggccggatcgtcggagtagtcgacgatgtcgatcttctccgggccaaggttctccataacggcacgcacgcgagcgccgccggggccgatcagcgcgcccttcgggttcacgccatcggtgttggccttgaccgcgatcttggtgcgggcgccggcctcacgagcgatggccatgatggacacggcaccggagaccagttccggcacttcgcgctcgaacagcttgcggaccagctccgggtgggagcgggacaccacgatttccgggcccttgatgccacgggccacgttcaccacgtacacgcggatgcgttcgccgtggcggtaacgttcgccgggcacctgctcacggcgaggcagaatggcttcgacatcgcccatcgcgacatgcacgttggaggggtcggaagcatcctgctggatgatgccggtgatgagcttgcccttctggccggagaacgcaccgaataccttctcatcttcggcgcggcggaacagctgggtgatgacctggcgtgcggtggctgcggcgagacggccgaagtcacgcggggtgtcatcgtattcctcgcccagcttgggaacggggtaagggttgtcttcggtgggttcgaccggaatttcgtcggcggcccacacggtgaagttgccggaacgttcgtcaagctccacgcgcgcgtgcttggcggcgtgcggggtcttgaggtaggcgaggcgcagggcctctgccagcgcatcatccagggtttcggggtcgattccttgctcggcggcgagcttgtgtattcctgtcaggtccagttccatcgatccgtacctcctatgaagttatgtggcgcatggcctatgagtagtcacagttagctattagtgtatgtttccatgcagacacgcttctcttcaggacggtttacccggcgcttggcatccgtactatgcgcgagcgcgatgctgtgttcgctttcggcgtgttcgatgccgcgactggccggacgggccgaggcagaagctcaaatgaccccttgcgagaaagcgatgacgttggcgggctacgccacccatccggctgaaggcacgccgttattagagcagtatgccaccggtctggccgctcccctggcttggattgacgttgccgggtattgttcgggtcgttttgccgagggaacgttacgtgacgcgcagaccaagcaatggctggcttttctggccgataaattcgggcagtccgcgcctgaggtgacgccggcgcgtcttgatggcgtcacgtccgccaacgttgatcgatcggtattggatgcgatggccgtggccgaggatcgcgccggattcgctatcgaggtcttggccgcacgaggacagaccgctggggctacgttggcgttgagcgatatgcataagaccgccgggcagcagctggtgtcgctggcgaacggcaattttgatgattccggcgcacagtccagttcttccggccagagcgacccccgccaaaaggtctatgccatcgaccaactactggccaaccccaccaccatcgccgacaaggcaagcggccagaccgtaccgaccgccgccgccatcgaaatggactgcgcccgcgcgcagatcaaggccgtgaccgaatcgaaatcttccaccgagagcgatacgctgctcatcctcgccgcactggccgccaagcacgcctacaccgcgttccaacttggctacccagcgactgacgccacattgttcgagtagacacacactcctcacgaagccgatgcgaacttgttggatgctagtgggcaagtcgagttgaggcacgttccaccaatgtgaaatcggtggtgtacgtacgggccgggcctgagtatccttcgatgcggtcgataagcatgtcaacggcatgcttggcataatcgtcgatatgtggatcaatggtggtcagcgccggaaccgagtactcggcttccggcacgttatcgaagccgaccacttgtacatcgtcaggtacacgcaaaccatgtcgttgattgcggcagcgtgaacgacatgcaccaaaggctcgtcaaggcgcggcgcatgatccgcaggcgcatccgggagggccaaccgttcatgaccagggtcgaatggcagtcgaacgactagaccgccgaacatacattttggcctataaccccgaatacggacgttcacatcaaaaacaaaaagggttccgggacaaaccccggagccctaaaggcggataaggcgagattcgaactcgcggaggctttcacctcacacgctttcgaggcgtgctccttagaccgctcggacacttatccatgctgccaaaatggcaacttgttcattatgccacattctgccgacctggcaaatcggagtttcgctgagcaagtctcgagtgtatgccgcttgagacatgtcagatcacaatcccggaattcgcccgaagcgctggcattgcgtttacgcgccaagcactccgacaggaattacatacactccatcatcgcgttgatacgcgaactcgccgacccccaccaacaccgccaagaactccggttcacgggtcgcgcactcggatttctcagcagcttatctttcagtctgcatagatttgccgatgcctcagggactttatcctcactggacttaatttcgatgccgccccaccgtccatcggacaattcaataatggcatcacactccagaccggaatcgtcacgataataccgaaccggttctatcccaatatcgaggagagatctcgcatacaccaacagatcacggatgcatagattctcaaacagaaacccaaaagtctgccaatcgccgataagagcagcaggactcatgcccaacattgcggccgcaatggaaggatcggcaaaataccgacgcgccttggtctggagtcgctttggatcccgtgccggcgggacccagccctttatcggatcgatgacgaacatgttctcgaacatggccgtatacccggataccgttctctccgaaatgaaatcgtcaaggttttcttcagtaccgtacatatccttacgtaaggttttgaatgtcacagcttgactgatattgcgcgcaagcgaatccagcagacgacgagccacatcaggatccttgccttgcctgggcacactctcagtcagcgtgagtcgcatgtattcccgaatcagaatctgtgcgtcagatacaggcagagccaccgcctccggccatccacctcggcatacggcatccaacaacatttgtgtacttatctctgattttgcagcggcgaacttatgttcaaacagtccactgagacttaccgcacctgtcgagagtccggactcatataaagtcagaggattcatacggatacgtccgattcgtcccgcaccactatggttcggccgattctcattgagaggagtggatgaaccggtcagaatccactgacctttattcgcggaatcatcgtcgacgcgatgacggacttcatcccatatagctggagcgagttgccactcatccacgatatgagggcgataggctttcggcttgatgtcgctcgccggagaatcggccattccgcgcacctcccgttgtttcacgtccgccatcgcaataatccgaatttctcaactaccaaaatccgaatgttgcaacgacgaaaatccgaatattggtggtggtagaagcggcggcggggccactctgcattgagtgctctctccctcggtcagccttacggctgacagctcgaacgcaattaaggacagctttccagctgccattttatttgctcactgtcgttcgccttcgcctaaaaacgcctccggcgttttcttcacggctcagctcatcagagggggcttggaattttatttatgccacctgctcgtggacggaggcgttgacccattgggactgctggacgttgtagccggagaagatgccgatgtcgagcatgcagtcgcggtaatcgcggccgtgggcgatggtgatgtagctgtcgtccaccaatcggttatgcgtgggatccagtccgacccatcggccatcctgatacacctcgacccaagcgtgggtcgcgccctctcccccaagcaaaccggcaatgtagcgcgcggtcaatcccacatgccggcacacggacagcatcacgtgcgcataatcctggcatacgcccttgcgctgagccaaggcctgttcggcggtggtgcgaatcgtggtggaaccgggcgtatacacaaacgccttgtagacctcatccatcacttcggcagcctgctgcaccggagtggcgtcggaaggcagcgccgccaagcgttcgcggcatacggcaatcatcgcctccacgttcgggccgggaatggtgagcgctgaattgaatcggtacagcggtttataggcttccttatggatatgcgcattgtccacgaaggcgatgccggtcaccgagtagctgaatatgtcgtgcggctcagggatgaatccggtcatcaccacggagtcaaaggagtcgatggtggtttcgagttcggtttcgggctgaatcttcacttccacgtcaatcacctgttggcgagggccagtggagggaatacagcgaagctggaacctgtgatcggtgaccggtgcgctgaaggacagcctcatctcatagtcgaacacgagttttttcacaacgtctcctgcacttgcacacgagccggcaaccggcatattctcgggataacgacactacagccatggctgaggtatggtccgtgcgctcacagcccacgcatatattccggcaatctgctgatatgcacaggccggcactcgggcgcacggttttttcgccataccaccatagcatttgaacccgtcagggtgtcaggtcgggatcagggacgcttggcgtccatgttcatggagctcagtgagcccatgtctttgatggccagcgcgctgacacggccggagtagtcgtcgagatacttcttgagcaggtcggcgacttcctgatatccgcgagacggcagctgaccgaccagccagctcagtccgtcggcgaagcagctgggcagcggcatgccgtccaaggtcatcgaataggcggcgagcttcttgagcggcgcttccagatcctccatcgtcaggccgaagcgcgtgtacaggtcgatgcgttccagatatttgccgatgaagatgaacgccttcagcgtggggtcgaccggcgaattctcgatgccgccccagaaggcgagcatgtcatcggtaatatcgcgctgcttgtagatgtcctcggcatcggccgcgtatttggcggcatcggtgatattggtcatcgccaactccacgtactgcagcagacgcgagctcaattccgggcgcagaatcacggcgttgttgaatgcggaggttacggccgaccgcaccgaatcaggattggacccgtcgtacaggaagctgttcacgaacccgtcgaagtcctcgaaatcttcgggcaggtcgagtgcgtgagcgaacggacggaaggcgtccacatcggtgtccatcacacgatcgtagaacgggaagaactggttcagcgtggtgaaggcgcgctcggtgtatcgacccagccaatacaggttgtctgccttggaagcggtgaccagcgacaacgaatggtggcgggactggctcagcaggttcgccacctgcgtttcggcaccgtactcgtgctccacgccggattcgggtgccaacacccacgtatccttgaatccgccaccctgcgacgagttgacaatcatctggccgggcaccgacgagtatcgagtcaagcccgaataccacacgtgcgtattcttgccggtgaccacgaaggcacgcaaatcgcacttgcgcggcgacatctcgccggtcttcgggtccaccacatcgatatcacggaactgaatcacctcttggacaatgaatcgacgcggctcctccttgatccggttggcgagctcctcacgtgcggcggcatccagcgacgaaccaaacaccacgccgtaaccgccggcttcggccacatccttgatgaccagctcgcccatccgattcaggacttccttgcggtcggcctcgaacatcggcatgtacgtgggcgcgttgttgagaatcggttcctcgccgagatagtacttgatcatctgcggcacgaagtagtagacggccttgtcatcggccgcgccgttgcccggtgcgttgacgatggccacgttgcccgcgcggtaggcggacaggataccgggcacaccgatcaccgaatcaggattgaaggcgaacgggtcgaggaattcgtcggacaggcggcggtaaaccacgcccacacggtggcgtttgccggcgtagtcgaggaagtagaccttgttgtccaccacttcgaggtcttcggggaaggccaacgccgcaccggttttctccgccagataggcgtgctcgaagaacgcggaattgtagcggccgggagtcagtaccacggcgatgccctcggtggagacaaagtccatggctttgcgcaacaggcgcgggtattcgcgattatcgcgaatacgaacgtcgcggaacaggcgcggggagatgcggcgctcgatgtcgcgcacgaacagcgggtagctggcacccgaggggatgcgcaggttgtcttccagcacccaccagcggccgtcctcgccttggaccaggtcctcgccggcgatatgcgcgaaaatgccgccgggaggggtcacacagttgacctgcgggaagtagccggccgaggtgtatacgtattcttccggcacgacgccatcatgaataatgcgcttatcggaataaatgtccttcagataggcgttcagggcgttgacgcgctgcttcaggcccttctccaattcgtcgtattcgtcggattcgataatgcgcggcacagggtcgtacgggaacagccggtcatggtattcgccgttcttgtagatgccgaaacgcacaccgttgcgggacagctctcgattgatcgcttcgcggcggtttaccagttcatgggccagtctgcgtgctgcggattcgatcatcgtgcctgctccttgctgtggcggcttctgtggcttcaagcggttaggcgtgttgagcgcacgctgacgccgcaagccgtaaccgggtttgatggtttcaacctaaggcgggcccgtttcaacaaacgcgcgagaatgttacaggcaggtcacttcgccggccgcgtgcatcttgacgaccgcactcgtctcgccgaccgcactcgttacaatgaatggctatgacacgactgcgcattgacttggcctacgacggcggcggattctatggctgggccaaacagcccaatcttcgtacagtgcaaggcaccattgaagatgcgctgcacaaggtgctgcgggtgccgaccgatgacgcggccgaaccgttacgcttgacagtggctggacgcaccgacaccggtgtacatgcctcccaccaagtggcgcatctggatgtatccgatgaggtactgaatcgctgcgtaggtcacatgaccattccggtcaccgaggcgctgactcgcagactcaaggctgtgctgccttcggacatcgtcattcatggcattgccgtagctccggtcggcttcgatgccaggttctccgcattggagcgcacttatgtgtatcgggtcgccgatcgttcgtctgaggtcgacccgcgcctgcgtggatgcgtacttaccgtggatgaagcgctggatctggagcttatgaaccgcgcagcctcattgaccatcggcctgcacgattttggttccttcgccactccgaatccgggaggcactacgatccgtgaagtcaagaccgcctattggcggcgggtgccgatcactcccctagtaccggatgagatggcatcgcatgaagcatatcggactccgtcgctggagtccggcctggtagtgttcacgattgtggcggacgcctttgcccgcaatatggtgcgctccctggtcggctcatgcatcaaagttggttcgggacgcaaatcactggagtggtttgccggcaaaatggccgagccagtacgtgaaggctcaagcgggccgattgcgccgcagggcctgactttggagcatatcgcatatcccgccgatgatcagctggccgcaagagccgaggccattcgggccgtacgtacgttgtagattctatgaaaacaacgcaaaagggctggaacccaaacggattccagccctttcagctagcttagcgaaacgctattcagctcactcggccttcccggcgtcagcggcttcctcagcgggagcctcagcctcagcggcggcggtctcctcgaccggagcctcaacagcctcagcagcctcagtggcctcagcctcaacggccggagcttcttcttcggcaaccttggcggcggcttcagcttccttcacaacagccttcttggcaaccggctcggtgacgagctcgatcacagcggccggagcggcatcgccaacgcgcggagcgatcttgacgatacgggtgtagccaccttcacgctgctccatctgctcggcaatctgggtgaacaggatgtgcaccacggacttgttgcggatgacgcgcatcacgcgacggcgggagtgcagatcaccacgcttggcgaaggtgatcaggcgctctgccagcggacgaaggcgcttggccttcggcagcgtggtggtgatgcggccgttctggaacaggctggtcgccatgtttgccagcatgaggcgctcgtgtgcggggctggaagccagacgcgggcccttcttaggtgtaggcattgggtttactccttatatgtccgttcttcaggcaagcaggtgggcatatgcccgaacatctgcttgcctagtgaacgaacgattggtcaaagaggcagatcactcgtcttccggcgagaagaacgtgccaccttcgagattattggtatcgaaggccatcggcgaggacttgaggctcaggcccaaggtctgcagcttctccttgacctcatcgattgacttcataccgaaattgcggatgtcgagcaggtcctgctcggtgtgggagacaagctcaccgatggtgtggatgccctcgcgcttgaggcagttgtaagaacgctgcgtcaggttgaggtcctcaatcggaacggccatctcggggttggtctcctcggccaccggggccggaccgacctcgacgccttcagcctgggcgttgagctcacggcacaggccgaagagctccaccaaggtggaaccggcggaagccaccgcgtcacgcggggagatggcgggcttggtctccacgtccaggatgagcttgtcgaagtccgtgcgctgttccacacgggtggcctcgaccttgtagctcaccttgagtaccggggagtagatggaatcaaccggaatacggccgatctcatcgttgtcctgcttgttcatctgggcaggaacatagccacggccacgctcgacagtgaactcgatctcgagttcgccatcgtcggcgagggtagcgatgtgctgctccgggttggcaatggtgacgccggccggcggggtgatgtccccagccacggcttcgcccttgccgctcttgcgcagatacatgaccacaggctcgtcgtattcgctggtgagcacgatgcccttgatgttcagcaggatctcggtgacgtcttcctggacacctggcagagtggtgaactcatgcagggcaccggaaatacgcacggaggtcacggcagcacccgggatggagctcagcagcgtgcgacgcagcgagttgccgagcgtgtagccgaagccaggctcgagcggctcgatggtgaagcgggagcgctgcggattcagagattcctcggtaagagtcggacgctgtgcaataagcactgtggttatcctttcagcttgaactcggtggtgcactcaccggtcaggcggttttggatggatttggtattgctgagtgctcagacgcgacgacgcttcggaggacgaacgccgttgtgggcttgcggggtgacgtcggtgatggaaccaacctcgaggcccgcagactgcagggaacggatggcggtttcacgaccggaacccgggcccttgacgaacacgtcgaccttcttgacgccgtgttccatcgccttgcgggcggcggactcggcagccataccagcggcgtacggcgtggacttacgggagcccttgaagccgacatcgccaccggacgcccaggacaccacggcgccggacggatcggtgatcgaaatgatcgtgttgttgaaagtggacttgatgtgagcctggccgaccgggaccgacttgcggtcgcgacgacggggcttacgagcggcttgcttaggcgctgccattgaccctcgtttcctagtaacgaactttgttgttgacgttcgggcgatgggatgaaaatcatcccgtggcccgaatcatgccaccgactacttggtggccttcttctttccggcgaccgtgcgcttcgggcccttgcgggtacgagcattggtcttggtgcgctggccgcgcacaggaagtcccttacggtgacgctggccttggtagcagttgatctgaatcttgcgacgaatatctgcatcgacttcacgacgcaggtcaccctcgatcttgtagttggcttcgaggtagtcacgcagcgtaatcagctgctcgtcggtgagatccttgacgcggatgtccgggctaataccggtcgcggcaagcgtttccttggcacgagtgcgacccacaccgaaaatgtaggtgagggcgatctcgatgcgcttctcattggggatgtcgactccggcaagacgtgccattgcgattccttcttgttgccgtaggtcttgcacccgctcgcccggttacccggcacgggcctacgtacccgtggttcagtgtcgttcccttgcgggaagcactgtgagagagtgccttatttacttagtgccgctggagaatctgctctcagccctgacgctgcttgtggcgcgggttgacgcagatcaccatgacgcggccgtgacggcggatcacgcggcagttttcgcagatcctcttcacgctagggctgaccttcatggttatccttttcttgtgtacctttacttgtaacggtacgtaatgcgtccgcggttcaggtcgtaagggctcatttcgagcacgacacgatcctgcggcagaatacgaatgtagttcttacgcattttgccggaaatcgtggcgagcacgatgtgcttgttttcgagttcaacgcggaacatcgcgttaggcagtgcttccacgacctgtccttcgacttcaatcacaccgtcttttgccatgtgcctctagtcctattccgttggatgattactatggcatatccgaagacacaccaactgtcaactatatacgcacatacccctgtacgaacactcggcgtgtcgcacaggggtatggaaacgttgatgtggtatttcggcatcactccggcttgttgcccgggctgccgaacctactactcgaggtggctgatgatacggccgctgatctcgtcgatgtcgccgacgccgttgaccacgacgagcaggccacgggcctcgtagatgtcgagcagcggagcggtttccttctcataggtctccaggcgcttggcgatggcctccggagtgtcgtcagcgcggccctgctcggcggcgcgcttcttcatacgctccagcagcacgtcgcgggcggcttcgagggccaccacgtggtcgagcgaagtgtcgaggtcggcgagcatctcgtcgagagcggtgacctgggcggcgttacgcgggtagccgtcgaggatccagccgttcttgcagtcttccttggccagacgatccttgacgatcttgttggtcagggagtccggaaccagctcgcccttgtcggtgtagctcatcgcctcaaggccgagttcggtcttgttcttgatgttgtagcggaagatgtcgccggtggagatggtggggatgttgaagtgttcggcgagcagagcagcctgggtgcccttgcccacgccctgggggcccatgatgagcagacgcatggtggtctccttttgtgtcggttattaatacggttttggctcccttggttaggggagccattgagttatatgtggaagaaagattgctccgtcgtggaacagtccactggactgttccactcctcgcgcggccgcctgcccattgcgggcgaccgctgccaagcgggcgtcagccttctttgtggtccacgttttcgaacaggaagccggtgtactggaactgttcggtctgggccttggcctggcgcagggtgtcgaggcccacgcccgcgataatcaggatcgtggtgccaccgaacggcagcttggcgttgaggccgagggccatgatcagcacggtcgggatcagggccacgaacagcaggtagacggcgccgacggtgttgagtcggttcatcacgtaggtcaggtagcggctggtggcgttgccggcgcggatgccggggatgaagccgccgtactgcttcatgttgtccgcggtctcgtccgggttgaacgtgatcgaggtgtagaagaagcagaagaacacgatcatcagcgcgtacagcgcgatgtaccacacggaggtggtgttcgccaggttggcgttgatccacttgacccacgactggtcggacttgccgaactgggcgatcagggtcgggatggcgaggatcgaggaggcgaagatcggcgggatgacgccggacatgttgatcttcagcggcaggtaggtggaggagccgccgtacatcttacggccgatcatgcggcgcgtgtactggaccgggacgcggcgctggcacagttcgacgaagtcgacgaagatgaggatgaccacgagcacgcccacgacgatgccgaacttggtccagtcgccgttcttgccgttggtgccgtagccgatctcccacaattggggcaggaagccggagcagatggacatgaagatcaggatggacatgccctggccgatgcccttgtcggtcacgagctcggccatccacatgatcaggccggtgccgccggtcatgatgaggaccatgaccacgaggttgaacacggagccgtccgggatgacctggtcgcagcggtagttgaacagggcgccggagcgggcggtgaccaggatggtggtggactggagcacggccaggccgatggtcaggtaacgcgtgtactgggtgagcttggcctcgccggactggccctccttatgcagggcctcgaagcgggggatgaccacgcgcagcagctgcaccacgatggacgcggtgatgtacggcatgacgcccagcgcgaagatggacagctggagcatggcaccgccggagaagaggttcaccagtccgatgaagttctcctgggaggcgctgcccatggtggccatgcacttgttcaccacgttgtagtccacgcccggggtcgggatgaacgatccgatgcggtagacgatgatgatgaacaggacgaagagaatcttcttcctcaactctttggttttcagggcctggattagtgtcctcacctggatttcctcccaatagcgcgccaatcgcgcgaaatacacaaactaacgaacgagcatagtctaaagtgcctacttcggccacttcatgtctcgcgaatgttacctgaattatgctccgtcgtactgaacggggggaagcatactcaaaacgatcattgtgttgagactgcttctctgcactcagaacaacaattttttagaaaagggaacccccgtccacctattggcgggcgggggttgtacagcctattgcgctccccgtaggactaatcagtcctcggaaacggaaccgccggcggcctcgatcttggacttggcggaagccgaagccttaacacccttgagggtgaaagccacggtggtctcgccgtcgcccagaaccttcaccggagcgttgtcacgaacagcgcccttggcgatcaggtcggccacagcaacctcgccgccctcggggaagagctccacgagacgagcaatgttgatgacctggaactcgaccttgaacgggttcttgaagccacgaagcttcggcaggcgcatgtacagcggcagctggccgccttcaaagcccggacgcacgtggttgcgcttcgtctggcccttggcgccacgaccggaggtcttacccttggagccttcaccgcggcccacacgggtgcggtccttcttggcacccggggcgggcttcaggtcgtgcatctgcaggatttcgttatctgccataatcagtcaacctcctcaacggtgaccaggtgacgcacggcgttcaccagaccacggttggccggggtgtcctcgcggacaacggtcttaccgatcttgttgaggccgagggtcttgacggtggcgcgctgagccggggtacggttcacgatgccgtggtgcagggtaatcttcaggttcttagccatgagtatcactcaccatccttctcttcggcggccttagcggcagcagcctcttcgcgagccttgcgagcctcggcaatgccggcggcgcgggcgcgcagcagagcatcgggagcgacctcgtcgagcgccaggccacgacgggcggcgatctcctcgggctcttcgagctgcttgagggcgtcgacggtagcgcgcaccacgttaacggcggtggcggagcccatcgacttggtcaggacgtcggtgatgcctgcgcattccatgacggcgcgcacggagccaccggcgattacaccggtacccggggcggccggacgcagcaggacggtgccagcagcgtcgtgaccctgaaccgggtgggtgatggtgccgcggacgcgaggcacagagaacatgtgcttcttggcgtccagctggcccttggcgatggcggccgggacttcacgggacttgccgtagccgacacccacggtgccgttgccgtcgccgaccacaaccagtgcggcgaagctgaaggtacggccacccttgtgggtcttggacacacggttgatggtcaccacgcgatcgagcagctcgtcgccgtggttttcttcacgacggttacgacgctcgccacgacggccttcaccgcgctggccacgacgacccttgcggtcctcgttgttggattcggtcgccacagtgttctgagtttcttcagccacttgggtttccttcgtttcgttgtcgctcacagtgcaagacctccctcgcgggcgccatcagcaacggctgcgacgcgaccggtgtacttgttgccaccgcggtcgaacacgactgcggtgatgccggcagccttggccttctcggcgatcagctcgccgaccttcttggcggcctcagtcttggtgccttcgaagccggcgaagtcggcctgaagagtggaggcggacaccagggtaatgcccttggtatcgtcgaccacctgagcaaccatgtgacggttggagcgggtgaccaccaggcgcggacgctcgggggtaccggagatgcgcttgcggatacgcgcgtgacggcgcttgagagctaccttcttgccttttccgagaatagcaacgctcatatcacttaccagcctttccagccttgcgcaggatgcgttcatcggagtacttgatgcccttgcccttgtagggttccggagcgcgcagcttgcggatgttggcggcaacctggcccacgacctgcttgtcggtgccttcgacaaccacgtggttggcgtcagtcaccttcagggtgatgccttcgggcgggttgacggtgatggtgtgggagtagccgaggaagaactcgatgccctggcccttggcgacggcgcggtaaccggtgccgacgatctcaagagtcttggagtagccatcgtgaacacccttgaccatgccggccatgatggaacgagccagaccgtgcttggcacgggtcggacgcaggtcatcagcggcggtcaggacaatctcgttgccttcaacggcagcggtgatgccttccggaaccacgtaggagtcagaacccttagcgcccttggcggagaagttctggccttcaatcttgacttcaacgccagcagggatggcgatggggagcttaccaatatgcgatgccatgtttcagctctcctttctcaccacacgaaggcgacaatttcgccgccaatgcctcggtcgaggcattccttctgagtcagcagtcccgaagaagtcgagatgatggcgatacccaggccaccgagcggcatcggcagggagtcggacttcgcgtaacgacgaaggcccggcttggagatgcgcttgataccctgaatggaacgctcaccgttcggaccgtacttgagggtgacctcaagagtctggccgaccttggcttccttagcggtgaagtccttgatgtagccttcacgcttcaggatctcggcgatgttcgccttgaacttggagtacggcatatccacggtttcgtgcttggccgcgctcgcattacgcagacgcgtaagcatgtctgcgatcggatctgtcattgtcatttgggcttgttgccctttctcgctatggtttccgccgccctcacgcttcttctagaagcgttcgggccgcggaccttcagcgtcgatgtttaccaactggacttcgtaacgccgggcagttcaccgcggtgagccttctcacgaaggcagatgcggcacaggccgaacttgcggtagacggagtggggacgaccgcagacctggcagcgcgtgtaagcgcggaccttgaacttcggcttgccggccgccttgttcttaagagcggtttttgccatatcagttctccttgaaggggaagccgaggtgcttcagcagcgcgtaagcttccttgtcgtccttggtggaggtcaccacagtgatgtccataccgcgcacgtgatcgatcgaatcaggatcgatctcgtggaacatggactgctcggtgagaccaaagttgtagttgccctggccatcgaactggtggccgttgatgccgcggaagtcgcggatacggggcagcgcgagggtcagcagacggtccaggaactcccacatgcggtcgccacgcagggtgacgtacgcaccgatggcctggccttcacgcaggtggaactgcgcgacggacttcttggccttggtgatcttcggcttctggccggtgatcagggtgaggtccttgacggcaccttcgatgagcttggagtcgcgggcagcggcaccaacacccatggagacgacgaccttctggacacgagcaacctgcatcgggttggagtacttgaactccttctcgagctcaggaatgatctgctcgttgtacttgaccttcaagcgcggggtggccggcgcttcgacagtagtatcggtcatgccagctcctttccggacttcttggcgacgcgcacgcgcacggtcttcaccttgccgtcacgcgcctcttccttaacggtgatgccaacgcgggtcggctgcttggtctccgggtcgatgaccatcacgttggagcgatggatcggagcctcagtggagacgatgccagcctgctggccctgctgcgttgcacgcacgtgcttcttgacgatctgcacgccttcgacgattagtcgatcgttggagagcacctgcttgacggtgccttccttgccgcggtccttgccgcggatgaccttgaccaggtcgccgctcttgatcttggctgccatgtcagatcacctccggggcgagggacacgatcttcatgaacttgtgctcgcgcagttcacgaccgaccggtccgaagatacgagtgcccttcggttcacggccggagccgagaatgacggcggcgttctcgtcgaacttgatgtaggaaccatccgcacggcgggattccttgacggtacggacgacaacggccttaaccacgtcgcccttcttgaccgacccgccaggaatggcgtccttgacggaggcgacgatcacgtcgccgatgccggcatagcgtcgcttcgatccgccgagcacgcggatggcgaggagttccttcgcacccgtgttgtcggcgacatgaagccgcgtttcctgctgaatcattgattctccttagccgagctggttctccccatttaccggggcatcgtggttgcccataatgccccggtaaatggcgagccttgccgaactttacttacttggcgcgctcgataatggattcgagacgccagcgcttggtcttgctcagaggccgagtttccataatactcacgaggtcgccaatgtgggcgtcgttgtgttcatcatgggccttgaccttgctggtggaacgaacgaccttgccgtacagcgggtgggtcgaacgctgctcgagctcgacggtaatcgtcttgtccatcttgtcggacacgacgtagccgcggcgaaccttacggaagttacgctcttcagccataatcacttctccttggattcggtagcggccggctcctggctgatgccaagctcacgctcgcgaagcacggtgtacatgcgggcgatgtcgctcttgacagccttgagacgggcggtgttctcgagctgaccggtggcgtgctggaagcgcaggttgaacagctcttccttggacttcttcaagaagccttcgatttccgcgttggtcttctcgttgagattcttgatggagtaatcagcggtaccgactgccatcagatatcaccaccttcacgtgcgataatgcggcacttcatcgggagcttgtcgatagcgcggcggagggcttccttagcgatgtcctcggacacaccaccgatttcgaacatcacgcgaccagggcgcacgttcgcaatccagaactccggggcacccttaccggaacccattcgggcaccgagcgggtgcttggtcagcggacgatccgggaagatcgtgatccacacgcggccaccacgcttgatgtagcgggtcatggcgatacgcgcggcttcgatctgacggttggtcacgtaggccggggcgagggactggatggcgaaatcaccgaagttgatctcgttgccgcccttggacatgccagaacgcacagggcggtgctgcttgcggtacttagtcctcttggggataagcattcttgctcactccttcgtttctgcagccggagcggcctcggcgggagcctcagccttgggggcttcggcggcctgcggggcggcggaacggttgccacggcgcgggcggcgatcgccaccacgacggcccggacggttgttctgctgagcctgctgctcttcgaactcggattcggtcatgtcgcccttgtagatccagaccttgacgccgatacggccgtacgtggtcttggcctcgaagaagccgtaatcgatgagggcgcggagggtctgcagcggaacgcggccctcacggtagaactcggaacggctcatttccgcaccgccgaggcggccggagagcttgatgcggatacccttggcaccggcgcgcatggcgtcctgctgggccttacgcatggcacgacggaaggtgacgcggttggtcagctgctcagcgatgccctgagcgacgagctgggcgtccagcgcggcgttcttgacttcgaagatgttgagctggacctgcttgccggtcagcttctcgagcttggcgcggacgcgctcagcctcggcgccacgacgaccgatcacgatgcccggacgggcggtgtgaatgtcgacgcgaacgcggtcgcgggtgcgctcgatgacgatgcgggacacgccagcgcgctcgaggtccttgctcatctccttgcggatctgatcatcctcaagcacgaagtcgcggtagcgttcgccggccttgttggagtcggagaaccacttggagcggtggttctcagtgatgcccagacggtagccaaacggattgatcttctgacccatctttagcgggctccttccttgttagccacgacgaccgtgatgtgggaggtgcgcttgttgatgcgagcagcgcggccctgggcacgagcgcggaagcgcttgagggtcacaccttcgtcaacgtaggtctccttgatgtacaggtcgttctcgcggaacggctcgccggccttgtcggccttcacacgagcgttggcgatggcgctctccagggtcttgcggaccggcagggccgcagcctgaggggcgaacttcaaaatggtgacggcttcggtcgccttcttgccgcggatgaggtcgaccatgcggcgagccttgcgcggcgtcacgcggacgtgacgagcgattgctttagcttccatgttctattccttatccttagcgacgggccttcttgtcgtccttcacgtgacccttgaaggtcttcgtgggggcgaactcacccagcttgtgaccaaccatggcctcggtgacgaacaccgggacatgcttgcgaccatcatgaacggcgaaggtgtgtccgatgaaatcaggggtgatcatcgaacgacgggaccacgtcttgatgacgttcttggtgcccttctcgttctgctcgtcgactttcttctgcaagtgggcgtcgacgaaggggcccttcttgatgctacgagtcatcttctcgatactcccttacttgcggttcttgccggacggacggcgacgaacaatcatcttgttcgaagccttcttcggacgacgagtacgaacctcgcccttgccccacggggagaccggcggcttaccaccgcgggtacgaccgccgtgcgggtggtcgaccgggttcatggactcaccacgggtgatcggacggcggccgatccagcgggcgcggccagccttgccgagctgaatgttggcgtggtcctcgttgccgacctcgccgacggtagcgcggcagcgcgcgtcgacgttgcggatttcgccggacggcatacgcagctgagcgtaggcgccatccttggcgacgagctgaacggcagcaccagcggaacgagcgatcttagcgccgcccagcgggcggagctcgatggcatgaaccacggtaccggtcgggatgttcttcagcggcaggttgttgcccggcttgatatcagcctgagcaccggtctcgatgacgtcgccctgcttgatgcccttcggcgcgatgatgtagcgcttctcgccatctgcgaagtgcaggagggcgatacgggcggagcggttcggatcgtactcgatctcggcaaccttggcgggcacgccgtccttgtcccaacgcttgaaatcgatgagacggtactgacgcttgtggccgccgccgcgatgacgggaggtgatacggccgtaagagttacgaccgccggtcttggacttcttgcgaaccagcgacttctcaggcgtagaacgagtcagctcggagaaatccgagacggacgcgttgcggcggcctgcggtcgtcggcttataaacgcggatagccataatgtagttcttcctttaacttttctcggctaaccttcagttaccaaagatgtcgatcgtctggccctcggcgacggtcacgatcgcacgcttctgggaagcgcgctggccgaaaccggtgcgagtgcgctgcttcttgccagcgcggttgagggtgttgacgttcgtcaccttgaccttgaagatctcttcgattgcctgcttgatctgcaccttgttcgcatccggagccaccacgaaggtgtactggccacggtcggaagcggcgtagctcttctcggagacgacgggcttaagaatcacgtcgtgagcgggcttgtgaatagcgaccatctaaatcaggcctccttcggctcggtcttggcagccacgaaagcctcgaaggcttccttggtgaagaccacgtactgcgaggtaatcacgtcgtacgtgttgagctgatcgacgaaaatcgggtgaacggtcgggatgttgcgcacggagagccactcgttgatgttgtcgcgagtgaagacgaccgtggtgaacttgtccgcggtaatcggggccagagcggcgacagcggccttggtggacggctcggtgataccgaactccaccacggcaacgcgaccggcgttggcgcgatcggacagggcgtagcgcagagctgcggccttcatcttcttgggggtgcgctgagagtagtcacgcggctgcgggccgaacacggtgccgccgtggtaccactgcggtgcacggatggagccctgacgagcacgaccggtgcccttctgcttccacggcttcttgccgccgccggaaaccatgccacgagtcttggtggcgtgggtgccctgacgagcagcagcgagctgagcggtgacaacctggtggatcagcgggatgtgagcctggacatcctcggcggaaacgccgaagagagcctcaggagcttcaacggtgccggtggcctggcccttggcgtcggtgacgttcagagtaacgtttgccatggtttatcaggctcccttcacagccgagcggacgagaacgatgccgcccttggggccaggaatggcgcccttgatggcgaggatgccgttctcgacatcagcggagacgacggtcaggttctgggtagtggcggtcacatgacccatgcggccggccatacgcttgcccttgagaatacggctcggagtggcgcatgcgcccacagaaccgggacggcgctcgttcttgtgagaaccgtgagtacggcggtaggacttgaagccccaacgcttgatggtaccggcgaagcccttacccttggtggtgccggtcacgtcgacctcagcaccctcttcgaacaggtcagcggccagttcctggccggcctcgaactgatcgacgtcgtcggtgcgcacctcgacgaggtggcgacgcggggtgacaccggccttggcaaagtggccagccagcggcttggtcaccttggtgggatcgatggcgccgtagccgagctggacagccttgtagccgtcagattcctcggtcttcacggcggtcaccacgttggtggacacgtcgacaagagtgacgggcacgaagaagccgttctcgtcccacacctgagacatgccgagcttcttgcccagcagagccttgcgattagacataatgcttcctcctcccttacagcttgatttcgatgttgacgtccgcaggcagatcgatgtgcatcagggagtccacggccttgggggtcgggtccacgatgtcgatgaggcgcttgtgagtgcgcatctcgaagtgctcgcgagaatccttgtacttgtgaggagaacggataacacagaagacgttcttctcggtcggcagcggaacggggccaacaacagttgcgcccgcgttcgtcaccgtttcgacgatcttcttcgccgattggtcgatgacctcgtggtcataggacttaagcctgatgcggattttctgtcccgccattgccgtccgccctttctagcgatgttcgttgtactgtttaccaacctgcttctagggcaccggcgcgcatggcctcccttggacatacgtcctctggcggtcatccgacatcagtgcgcggtttccggctgtcacttcacttgaagtggctcccggcccgcgctcgcttttttaattccaatttgcgagcccaaatcaggcaacttgtttattcaagcattgaggtgggacagtggagttcgcgcgtgtcgcgctcatgccgttcgtattacctcgcggcatagccgctcggcgtctgttcgattgtcgcaatgcaggtctcacatctttcttattgagaaccattcgctgcgatatcatgacagatatgacttcccgccgcaagactcttaaacgcgattggttcgacaaccaacctggcgcatgggtaatggttatgctgcccgctgtggctggcttctttatcggcgggcctaatcttgatacgctttggctattggcgacgtgggccgtgtgctattgcgtgcagttcagcgccgcgcactggttcaaagcacacttttcacgccgttatctgccgccgatgctcacttatgccgtagcgctcatcgtcatcggtttgccattcctgattacgcataccggcatactgcgttggactcccttatatatagtgctggttgcgctgtcgatgctgtcctcgtggctgaggaaggagcgctcgctgtggggcaatgccgtgtcggtgattgccgcgtcggccatggccacggtgatcgcgtcgtttggcagcactgttgagacggcatgtgttatgcccatcaacgcagcacatgcctcgtgcgcagccgctgatgtcaccgccgcacgcgccgcgattcggaatatgccagatttgagccagatattcgaccttcacgcctggtggcccgcgggttcattgcccgtgagcgggctgattgccaccgtgctgtttgcgctgacgcagtatgggtcggttttggtggtcaaaaccatgatccgggaacgcgggaagcgttcgtacgtggcggcttcgtgggtatggcatgtggcgctattgctgctagccgccgtgccgtctggacgcagtccgtatctgattgcgatgactgtgctgctgttggcccgcgccgttgcgttgccggtggttacacggcgcacaaccttgaagcccgtggtgaccggcattaccgaggcgtttgccagctttattgcttttggctgcattattgcggcgatttagcgacgcttcagcgattccatggggtggtaacccactcatggggcggtaattgacccatggggcggacggtaaaattttaccttccgcagaatagagccgtttttgtacaccgccccatggggttttcaccgccccatgggcaagttaccgccccatgagtgggttaccaccccatggaggtgtacctgctggctgagggagcaccacatatgcaaaggagcccggcccctgtaatggggtcgggctccttgtgtcgcgctatgcagacactaagctgcaacaccgcggttggtggctactgatggtgccaccaaccacaaaccgcctgcaatcaacgctcggaggcttcctcagtggcggcctcaccctcgcgctcgatgcgcagcttgtggccttccgcctgggagacaccgtagtaagcaccgacggcgatgtccttcatgtcgttgatcagcgggatgcgcgggttggccggggtgcactggtcctcgtaggcgcgcatgccgatctgatcgagcacggaccagaagtagtcctcgtccacaccgcaatcctggaagctcttgttcatgccgagcttgttgtcacggtagtcctcgacggccttcgccaggttctccacggcttcggccggggtcttgccggtgtcgatgccgaggttgcgggcgatatcctggtagcgttccggggcgatgtacttgttgtacttcggccaagaagtgggctcctcaggaatctggccgttgtaacgaatcacgtacggcagcaggatggagttggtacggccgtgggcgatgtggcacagggcaccgatggtgtgggccatgccgtggcacatgccgaggaacgcggagccgaatgccatgccggccatggtggcggcgttgtgcatcttctcctgagcgttggtcttggccaggccgggctcgccattgacggactcagccaggttgtcccagatgagcttggccgcgtgcagggccatgccgtcggtgaagtcgttcgcgtacacggacacgtaggcttccatcgagtgggtcagggcgtcgaagccggcgtcggaggccagcttgcgcggctgggtgcgagccagcaccgggtccacgatggccacggacggggtcagcgcgtagtcggtgatcgggtacttgtagccggtcttgtgatcggtgatcacggcgaacggggtgacctcggaaccggtgccggaggaggtcgggatgcacaccagcttggccttcttgcccagcggcgggatcttgaaggcgcgcttacggatatcgaagaacttctcgcgcacgtcggagaaggcgatttccgggtgctcgtagagcagccacataatcttggaggcatccatcggggagccgccgccaaccgcgatgatcgtgtccggctcgaactcctcgcgcatcatctcagcgcccttttcgacggtctcgacggagggctccggctcgacgtagtcgatgatgcggaaggtcacacggttagagcgggcgcgcagctggtcgatgatcttgtcgacaatgccgagctgctccatgaccttatcgcacacgatgacggccttctcgatgccgtacatgtcgcgcaggtacttgatggcgttcggctcgaagtaggtcttggccgggatcttgaaccactgcatgttgttgttcctccgagcaatgcgcttgatgttaacgagattcacggcctgcacgttgccggacaccgagttgccgccgtaggagccgcagcccagggtcagcgacggggcgatggcgttgtagatgtcgccgatgccgccgagggaggaaggctggttccagatgatgcggcaggcgtgcatacggacgccgtactcacgcacgagctcctggttgttggtgtggatggcggcggtgtggccggcacccagcttgagcatcttctcgcacatctcgaaggcctgctccttgttgtcggccttgagcacggcctgcaccggagcgagcttctcgtgggtcagcggctcgtcgtcggagacttccttgcactcggcggccagaatggtggcgtcggccggaatctcgaagccagcagccttggcgatgaactgaggggacttgcccggcaccgcggagttcagcacgggcttgacgccggaaccggcagtgcagccgaacatgtactgttccagcttggccttctcttcggcgttgacgaagtaggccttacggaccttgagctccttgatgagctggtcgtagacgtccttgtgggcgatgatggcctgctcggtggcgcagatcatgccgtaatcgaagtgcttggagagcaccagatcgttggcggcgcgcacgatgtcaacatcggtgtcaacgtaggccggggcgttgccggcacccacgccgagggcgggcttgccggaggagtaagcggccttgaccatgcccggaccaccggtggcgaggatcgtggccacgcccggatgcttcatcagggcgcctgtggcctggatggacgggtgctcgatccactggatacagttctcgggagcaccggcttcgatggcggcgtcgcgcacaatcttggcggcctcgacggagcacttctgcgcgccggggtggaagccgaagacgatcgggcaacgggtcttcagggcgatgagggacttgaagatggcggtggaggtcgggttggtgaccggggtgacgccggcgaccacgccgacgggctcggcgacctcatcgatgcccatcacatcgtcttcgcggatgatgccgacggtcttctggccggccaagtagttggtgacgtgctcgcaggcgaagatgttcttggtggccttgtcttccacgagaccacggccggtctcgtcgacagccatcttggcgagaacgaggtgcttgttcagagcggcgatggaggccttggcgacgatacgatcaacttgcttctggtcgaggttctcgaattcgacgagagccttcttggcgcgggcaaccagcgcgtcaacttcggcctcagctgcggcctgcttctcttctggagtcggcttggtagcttcgaccttcttctttgcttctgccacttggggtcctcctcgatcttcttggggtatatggcaaagttctgggccatcgcctcgtcacctcagttgcaccagcgggataccgcctcagtaaccgaaaatgaccggtgatgcgttgtcacattgcatatgtgacctgaggcacaatatactgaacggtccggcgcgatgcatacgcacaaaatcgacggcgtttcacgtgcgatattgaacagtttttgttacgagttgtgcgaaatatcgaacaaatcctcactctatccggcgatttggtactttttgttcactttttaccgaaaatcacatgcctgcaaacaacacaatccgagaacttttttaaagtaagttttcaaaagcaatcattttctccacatttctagaaagttggtttaaaaaagtacccaaaatcgcctacaaatatacgattgttgcctcataacctccgcgtcgaggcacatgaaagccactttcataaagtaaacttgcatatatctcatcgcacaaaggggtaaacatgagggcaatgccatcgaccgcagtgaaagcgcacaaccgcagtgccatggcccagtatctgtatggccatagccatgtcaccaagcaggaactggaacgcgaactcggcctcagcctgcccaccatcacccaaaatctgcacgcactagaagatgacggactcatccgcaaaggcgaactgcaggattccaccggcgggcgcaaggcgcaaaattatgagttcaatcccgatcatcgcactgccatcggagtagtgatgcggtccaacgaactgcgcctgtgcgcgattaacctgtacggcaacgtcatcgaaaaacgcaacgatgccctgccttaccgcaacaccaacgtttactaccagcgtatcggcggcatcatcaacaacttcgccgccgacgtcgaaaagaagcacggcaaggtgctcggcgtctcgttcgccatccaaggcatcctctcccccgacgccaccaccatcatcttcggcaccattatgggcaacactgggctcacgctcgaaaccatcagccaatcggtccattacccgtgcatgatgatccacgattccgatgcctcagccatggccgaactctggttcgactccacgctcaccgatgcggtgtgcgtctatctggagcgacgcccgggcggcgcggtgatcgcggggggcaaactgtatcaaggcccgaaccagtgcaacggcgccatcgaacacatgacgctggtgccgggcggccgcgaatgctactgcggccagcgcggttgcatggacacctactgctcgccggagaccttgcccgaggattacgaaagcattcccggcttcttcagcgtgcttgagcagggcgaacggcatcatcgcgagcgcatggatgagtggctggattacgtggcgcaggccatcgtcaacgcgcgatccatcatcgcgggcgacgtgattgtcggcggtgaagcagcccagcatcttgaagacagcgacatcgaggatctgaagacgcgcgtcatcgcacgcagcccgttcggcaccgaccatttcaatctgcgcaagagctactgcgccgaagatcagaacatcatcggtgccgcgttgcggttcgccgagaattatctcgacggcatctgcggtgctgcggaacgcggcaggaaatcaagggcttccaccaaaagtgacaacacgtctacaatggaggtatgaaaaacccaccgttgcatcgttacgccactcgcccagggctgtacttcactgacgacggtggggctgacgtcgttgttcgttccgaaactgccgatcaggtttggctgtgtgtactggagcccattgatgagcccagcgctttcttccaagacgccatccgcctgttcgaggacccgaatatctcctttatccagcagattcatgagttcccggtatgcacacgcattatcgaacatttgtatctgcgcgagaccttgttccgcatgaccgggccgaactacggcctgtggtacgtgcacctgcccaaagcatgggacggcatgcgttatggctaccgcgtggacggcgcatgggacccgaaacacggcgtgcgcttcaatccatacaaattcctgcttgacccgtatggcaagggcatcgacggctccatggagctcacccccgccgccttctcctatgaatgcgatgtcgtggaccgcaaggtaatcggctcggcatacggtgccatgagcaccgtagactcgctcggccatatgccggtgtccgtggccatcgacgatcgcgatacccataagcatgagggcgacccgcagcacccgcatgtgccgtggcgcaaaaccgtcatctatgagatgcacgtcaaaggcttcaccgccaacgcaccgtggctgcccgaatcattgcgcggcacgtacgccggactcgcacaccccaccacgctcgcctatctgcagggtctaggcatcacatccatcgaactgctgccgattatggccaagcaggacgagctcttcctgcaagaacacagccgcaagaactactggggctactccaccctcagctacttcgcccccgaaccctcctacgccactaaagccgcccaggagaagggcgcggccgccgtgcgccaagaagtcatagacatggtgcgcgcactgcacgaggccggcttcgaagtcatcatggacgtggtctacaaccacacatgcgaaggcggcgtcgaaggcccgacggtctgctggcgcggcctcgacgacctggcctactatcgccatcaaaaatccaataccggtcgactcgaagacaccaccggctgcggcaatacgctggacttcaccaacacgcatgtggtcacctttgccatcgactcattacgatactgggccaagcgtatcggcatagacggtttccgcttcgaccttggcgtcacgctggcccgcctggaaggcgaattcacccatcatcacccgttcctctacgccctgcgttccgatctgctgctgggcaacctgaagctcattatggagccgtgggatctgggcaacctcggctggcgcaccggccaattctccgtgccgttcgccgaatggaatgaccgcttccgcgacacggcccgcaccttctggcttgaggatgtggacggcggctccgatttcgggcgtatcagtttgcaggagatgtccacgcgactctgcggctcggccgatctgttcgccaccgaaccagggcgtggcgctccggcctccatcaatttcgtgtcctgccacgacggtttcacgctgacggacctcaccagataccgctccaagcacaatgaagccaacggcgaaaacaataatgatggctcgtcggtgaaccattccgccaattttggcgtcgaaggcgtcaccgatgatccagacgtcattgcggcacgcgaacaggcggccatgaacatgatcggcatgctgctgctctcgctgggtacgccgatgatgctcgccggcgacgaattccgcaacacgcaggacggcaacaacaacgcctactgccaagacaacgacatcacgtggctgaagtgggattggatgtattccaccaacaagacgcgcgaaatgcgccgcttggaaaccgtgtctcgactggtggcgctgcgtaaatcactggacctatatcaccacgaggatttcttcacccgactgacccagatcggcctactcaagccctcaagccgcgtgcagtggttcctgcccgacggtaccacgccgatggagcgtgactggttcgatctgggcgtacgtagcttcaccatgcgattgctgtccaacagtgaggtggacgtgtgcattgtggtcaacggcaccgctgacgaccgcacattccgcctgccgccagacacccactggacgcctaaatggtgctcggccgaaatcaacggccgccgagccgggcatggcactcaggtcgaggaatgcgatttgaacggtgacaccaccgtctggacgcagcatgtaccggacgccagcgagacagtactcaagatggtcgaagaagtggccatgcagcgtacggaatcctcgactgagaatgaagcggataccatcaaattcgcgatgccagtaacagatcacgccgcaaacggcacctcgtccgcgcctcgggatgaggtatcagctgatatgcccgatgcccctgtggatgatacaccggacactcccgtcgacgacaatgtctggaccatgccggcgctgagcatcacgctgatgaagcaggtgtgagtcacactcaagacagcgcgacacaaacacaaaggctctccgcggaattccgcggagagcctttgtatgctcggtacaggacaagcgaaattaacgcttggagaactgcggggcgcgacgtgccttgtgcagaccagccttcttgcgctccacgacgcgagcgtcgcgggtcaggaagccagccttcttcagggcggcgcggttggcatcacgatcgatggcgttcagagcgcgggcaacgccgaggcggatggcgccggcctggccggtggtgccgccgccgtcaacgaggacgatagcgtcgaacttgccttcgagcttgagcagaacgatcggggagttgacctcacgctgcagcagcttggaggggaagtactcctccagagtgcggccgttgatggtccacttgccgtcacccggaaccagacggacacgggcgacagcctccttgcggcgaccggtgccgtagcccggctcaatcgcggaggtgccggtgccagcgccagcgttggtctcggtggtgtagttggtgagctcctcttcggtctcgacaacctgggagtcgttggtgttttcagccatgattcttatctcctctcaggtttcacttggcctgctgcgagacctgggcgatctcgaagacctggggcttctgcggggtgtgcgggtgctcggcgccacggaagatacgcaggcggtcgagctgcaccttggccagacgattcttcggcagcatgcccttgacagcgttcttgatgatgcgctcggggttcttctcgagcagctcggcgtaggagtcacgacgcagaccaccaggacggccggagtgcgagtagagttccttgcccatcttgttgccagtcagagcaatcttgtcggcattgatgatgatcacgtggttgccggaatcggcgtgcggagcgtaggtcggcttgttcttgccgcgcagcaggattgcagcctgggtggcgagacggccgagcaccacgtcggtggcgtcgatgacgtaccagtcatgagtcagatcagctggcttcggagtgaaagttttcactggattaccttttctatattgtgttccgggtctcagctgcttggtgtggcttggtcagggccgcatccaagaggcgtcgaacctcattatccgtgggctccctgaaagtcctcgatggcgagtgggatagcgctttgaaggaccccttagggaaacacaacaatccactagtatatcgccgggcttgacatagggcaactggggacactccattgggtttatggcttctcttcccctatttatggtttctctcccacccacttcggctaaccgactcacctacggtgaggcaattccctgccttctctcagctatcgcttctttcaggcctcgtctacggacagtccactggactgtccgcttaacgactcggctcgtcagagggaggtaaagcgggtcaggaattgaagatttgggcgaagcgttgggcaccgggggtgtcgaagagggtttcgagcggtaccacgttgcccttggcgtcggccagtgggatgcgccagttcgggtattcgttgttggtgcccggctggttctgcgcacgcttctcccccaccgcgtcggtgatcgaggcggcgagcagcttgcacggcgaacccttcagtgcgcggtacagcgcgtcgacgatatccgcctcgtgatcctcacgatgttcggcaaagtcggcatcaagataaccctgctcgaccagcatggccagcatcgcatcctgctcggccttggcggaggcttcgaattcctcggccgggccggtcagcaagcccagacgctcacgaatcttgacgtgctcgtattccaggtaaccggcggccggcggcaaatcgtgcgtattcacggaggccaatgcatacggacgccactgggagggggcgcggaacacgccgtcgcactgctcgaaccattcaacggcgcaaccgagaataccgtggctcgacagggaatcggccacatggtccggcaccacgccgaggtcctcacctacgaccacgccgccggcacgagaggcctcgatggccagaacgcccagcatgatgtctgagtcgtagtacacgtaagcgccatccatagccgaacggttctcgggaatccaccacaggcggaacagaccaaggatgtgatcgatgcgcaccgcaccggcacgggcgaacatgccatgcaccatattgcggtaggcctcgtagccggtggtctccagattgatcgggctcagcggcggctggctccagttctggccttgctggttgaacatgtccggcggtgcgccgaccgtggctcccttggcgaagcgctcgggattccaccacacgtcagcgccggaggggtgcacgccgacggccatatcggacatgatgccgatatgcatgccggcgtccttggctgcctgttgggcggaggacagctgctcggcggcaatccattccagccagcggtagaagtccaaagtgtccgggtactgcttgcgcagattggcgatttccggggagttgcgattgaacttgcgctcccagttgctctcctcgccgttgggtgctccccacttgtcgtagcacaggcaccacgtggcatacgcctccaagtcggaaccacagtccgccttgaattggtcgaatacgctttggcgttcggcggtacggccggccttgaagataatccacagggcgtgcatcttgctgcgccacatggcgtcacggtcgatgagctgggaatcaccgttcagcggttcggtgtcggcatgcagtccgtcgacggcattcttgtcgccctcgctgagcgtggcatattcggcgatcgcctcaggacggatgtacgtgaagttgatcaggcgacggcttaccggcagatacggcgacggggtgagcggggacaccggctcggcggcatgcaccggattaatgagcacgaagtcggcaccggtcttctgcttggcgtccaccagcatggtcttcagatcctcgtaatcgcccacgccccaggagttggaggagcgaatcgagtacagctgggccatccagccccacagactgccgcccttcatcgggtcaagcagatcgacgcgatcaggtgcactgatcaaagtggcgtcttgcacacggtcggcgaccttgacgtgcagcgtatggtaaccaatcggcagatcggcgggaatgaccacagccgcattcgaaatgaacgtaccatccaagtcgtaggcctgggatccatctccaggaccaacttcaatggtgccttgatatggctcgccattctccagcgtgatgctcgccgaaggcacgtccagaataccggtgttcaccagcacccggtcctcgctaccggcgatatgcagcacggtgggtgccaccaatcgggcgtaacgctcgttcagaatgcgtcggatggcgatgagttgggcgctctcgctggaggcgtcgatgcccagcgctgccagcacctcgatcaggacgtcatcgtctatctcgtggtagtcatggctcatgcccaaataactcgtgccgacaccgaccaacttggccagtcgaatcaacggacgggccagacgctcttcactctcggtaatctcactcatagccccagtctaacgccgtttgattgcgccacaccgtaagaaaaatgccatgattccgccaaattatgtactttttaccctcacatagtgagatgtgagcgctcacaatggtggacagggggtgattgccggccaaatttgcgcggcaaaacacagcaatagtgtgcttagcggcggctttccacggcgtgccgcacctcggccgaggggtcgttggccaatttggcaagcatcgcttcggacgtattggggttcagtgccacggcacggcggaccatcgaagaaagcaccgccggtgctccctcttcggattcggtgccaagtacgcccaagaaatccaatgtctccgcatccgcagtggggtcctgcgcaccctcaagccgcatcttccagctggtgcgcttgtttttcaacgccgtatcccggaccgcaggcaccgggtccttggtcaggcggccgaccagccaattcttgtcatccccgttggcggccacggcttgacgcacggacggttcggggtcttcggagagtttgaccaatacgttcgggaacggcatggtgtcggcgaggaacacacgatcggccaccggggtgtgcgggttgccggccacagcctccaaaagtgcggtggcgcgggagaacgccgcctgatcggcacggtcaggcaacggccgacgggcgaattcggacagttcggccgggtcggtggaatggcgcagacgctcgtatgtagcggtcagcggttcgaaatccaccggagcggcggactcggctgcggactgcgcgccttggtcctgctgctgggcgtccgtgtcggttgcagtctcggccgcggcctcggttgcggcctcggtgggctgggtctgctggctggtggtgttctcgtcggtcatgatgcccagcttagtcatacaggcgtcacgcgagcggaaccggaatgttgaccatgtcaatcggagccggcaccacagcggcattgaacgcttcccgcacacgctcctcgaatcgcgcgcaatcatcctgcggcaccaccgcggtcaactcgacgttcaccgcatacgattcatcctcctgactgccaccaagctgcgccaggatctgctggaatcgggccaactgcgggtattcgaggcgaacccggtatcgcttggcggtcatgatgcgggcggcgcgggcggctttcatcgccaatgatgcggcggatgagtacgcgcggaccagcccaccggagcccagcagaataccaccgaaatatctggtgacggcaaccacgcaatcggtggtgcccgactgcttgaatacgtcgagaatcggcttgccggcggtaccggacggctcgccgtcatcgctcatgcgttcggacagtcgcccatccgcgcctccgcacacggcggcatacgccacgtgtcgggctttcggatgctgctcacggatcgcagccacgaacgcgagcgcctcgtcgagcgtatcgacatgggcggcgtcgccgataaattcggactttttttcgacgagcgaatcgtgggcgggatcgtcgggcgtgttgagaatcgtctgcatgagcgtgttccggtggtcgactggctgggtgttcgattgagcgcgaggctaggcagggctatcagcgttcggagacgacgacgttatagtcttcgccggcgaagtaggcggtcaggcaggcgatcatctggcgggtgagctccttgaacgcgccgtcggcacgccagccgacgtgcggggtcaggacgatgccgggcacatggcagatggcgtcgtcggcggtcagcggctcatggtcgaacacgtcgagtgcggcgggaacatcgcccttttgcagtcgggcaagcagcgcaccggattcgatgacttcggagcgggcggtgttgatgaacagggtgccgggcttcacatgcgcaaggttctcggcggtgacgatgccgcgcgtggcgttgttcagcggcagatggacggagatgacgtcgctggtttcgatgagcttgttgagatcgtcgaccggagtggcaccggagcgttcgaaatgctcgggcggcacatgcgaattccatgcggcgacctccatgccgagggcgcgggcgatgccggccacggtggagccgatgccgcccagtccgatgatgcccatgcgacggccggcgagttgcagtccatcgccgctggcccacgcccagttgccggccttgacgtccttatcgagttggccaacgcggcggatgagctcgaacagaagggcgaaggtgtgctcggccacggcgtgatcgccataatgttcggcgttgcagacgcggatcttcagctcgcgcgccttatcgagattgaggtagctggcgacgccggtaccgcagaacacgatgcacttgacgtgcccctgcccgctgatggtgcgcagcagatcgtccgaaatgtggtagccgcccaccagcagggcgtcggcatccttcagacgctcggctatggtcgcctcgtcggacgtgaattcctcgaacatacgcacgcgggcaacgtcgtggagcgcggggaactgggccttgatgggctcgatcatcgagtcaagcacggacggcatcacgacgaggggcagatcggtgcgttcgctttgggtttcgtaaatctcggtcatgggctccacattaggaggccggcgggaaaagcgtcaccttgcggcttcccctccttgagaccaagccgagcaactattgctttgccgcctgctcctgcgtgatgttccattccttgacgacgttctggtccgcgcccatcgaatagatgacatcccagatgcgttggcgtatctgagcgtcgtaggcttcgtcccaacatgtgcctatgggatggtcgctggatatcgggcaccattggtagttgccttgatgcacgttggcggtgggcacccagtcgatgcggttgacgcgccacgaccccttgacgcccttcttgccggcgaactggatgcgtgcggtcacgccctgattgttgaccaaggtttccggcgtgttcgccgactcggtgacggcgttgcccagaccgtagataatccacgtgccgttatagttctcgatgggctgcgcacaatggcagccggcaccgtaaataacgtcgaaggcaccagtgtcggcaagctcatgggcttccgaaatctgccaggaatcggcgtaatcaaggtattcctgcaccgagtgcatggcgatggccaccacatcggcaccttgctcgcgggccttgttggccttgtctaccgcgcgctggatgtcgctgtcgtgattcgggtcgccgtcttcgcgcagacgatccacctgccagtcctcgtcggcggtcatgccgttgagggagaccgtgccggtgaccagacccagcttgccgccgccggtcggggaatcgatgaccaacggtttggtggagtcggcttcggttttgtacgagccggtctgggcgctgccattggcctcaagcgtgtcccacagacgggcgatgccatccgccccctgatcccaggaatggttggtggcgtgtgtgcaggcgttgtatcccacgttgcgggcggcatccgccacttccggcggaatgttgaagatcgggtacgcggcatatgggccgccgcgctgggcgatcggggtttcgaattcgcacacggcgatgtccgaagcctgaatgtactgcttcatcggcgcgaacagcgggtcgaagttgaaggcggtgccatccgtggcgttggggttcgggccttggaaatggctccacaatccctcatggaacaacaaatcgccgttgaccagcatggcgatgcagtccgtatccgggcaatccggtgaattgccgtgatgttcggtcaccggtttgggcgtgttcttcgctttattcaacgcgacgtccgacactccggcgtgtgcggggccattgccgtccgtgcgatgggttgcgaaccatgcgccgatgcccagcgcaacggcgagcacgatcacgaacacgataatcagcgccgcacggttggttcgtgtcgagttggagcgatgttgcccctgcccagcgatatggctcatctttgcccgcccttcggaactcttcttctctctctagggtaccgcccatctcggtcaagtactgcggggagggaggcgatgagcaagcgattggacaagcaatatataaaccggttaatcttcaatcaccattcacgaacaccacgcaaaagtctcacttagtggacatttttctttcgtcgctcggacttttcccgacgtgccgcactcgttcgcccactaaaatggcggtttggaggcggacggacaatggcgtacctccgactccgcttaccacaagcggagaccgcccgtcctcggttatttcaggagttacttaacccggagtttccggaaaacaaaaaagttccgagctttcacccggaaccttaatcggcggagtcagagggattcgaaccctcgagccgtttacacgactaacaccttagcagggtgcccctatcggccactcaggcatgactccacgttacgcaataatgcgcaacagcaaattactgtaccacgtcctgcggatacggcgtgccgaacgacacattattgaacgtccgcgggtgcggcgtcgccggagaacgtaacgataaccgcgcaaatcaccaacgccacaccgacgatttcaccaacgctgggaatctcgccgaacgccagtcccacggccaccgccatggcgggattgatggattgcattaccgaaaatgcgccggatgtggtgcgtcgcagcgtgatctgttccaccacatagggaatgaacgaggccatcagggaaatcacaaacagcagagccagcagcttcagcgagccgccgggctcaagcgcccacgtggcatcggccttggggtgaaccacatgagccacagccggcatgccaaggaacagggactggaccagccagccgatggtcacggcgatgcacagattatccagcgaattgccgccagccgccacgcgccggccggtgatgatatacatgccccacatcgacccgccgatcaaaatcgcaatcagaccatacaaaaacgtgccattgccggacggattggccaatgatatgccagctaacagcaccacaccgaccgccgcgataccgataccgacccgctcgcgccagcttttgccggtaatcaccgccaccgaaagcggtcccaaaaattcgatagacacggcaatgcccatatccatattgctgatggccacataaaacagggtattcatcagcaccagcgagcagccgagcagtacgaccagcccccagctgcgggcgtcgcggtgaaacagttgcgctcgcttcgccttgttccagggcctgcgccacagcagcaacagcaccgccatgaatcccacgcgataccacaccgagtacagcggatcgagctgggtgaacgcaagtttggcgacggccgtagccaaataaatcaccagtgcctcaccaatcacgataagaaccacgggaacacggttgaggataccgaccactgccttcttcatgaggtttacgctactcggagagccgggacagcgcgcattgacttggaaggcgttacggacagtgacgcaatgtggacgattccgtggaatcgcacccaccatgcgaaacagccgcacagtgcgtaaacccttggaattccggcgatattcggcattatgacaatgagcgccgcgtcatgcgcgccacatagtgagcatgacctcgttcggcattcctacaatggtggcatgagcaccgcaccgagacttgaggccgccaaacgcgattggggccacgacgagaccggatgcaccgtgctgcatatcgacatggatgccttctatgcctcattggaggtggcgcgcaaccccgggctcaaaggcaagccagtaatcatcggcaccgggccgcgcgcggtggtgtccgccgcgagctacgaagcccggaaatacggcatcaattcggcgatgccggccgcgcgcgcccatcggttgtgcccgaacggcatttttctgccagtggatatggcgtattaccgcatgatgtcgcaccgaatcatgcatgaggtgtttttgaccgtcaccgaccggttcgagcaggtttcggtggacgagggctatatggatgtgtccgccgcactgctggagtgggggcggccgagcgcgatcggcgcgtggattcgcgctcaggtggccgagcgcttccacgtgacgtgttcagtgggtatcgcctgtaacaaactggtgtccaaaatggcctcgaccaatgccaagccggacggcatgctgctgattcccgcggcccgctcggccgaattcgtgcagatgatgccattgcgtggtattccgggaatcgggccgtctttggagaagcggcttaatgcttggggcgtgcattcggtggctgaattggctcagctggatgaggctgcattgactcgtgccactggctccccggctgcggcacgtggattatgggcggcctcgcacgggttggattcccgcgaaattaccacggtacgcgaggagaaatccattgggtccgaggaaaccttggccgaggatacacgcgatatgcgcgtggtgtgtgggctactgcgttcggcctgcgacgaagtaaccagcacgctgcggcgcaaggggctggtggcgcgcacgctgacggtgaagttgcggttcgccgacctgagctatcagacccggtcttttacgatggagcggccgaccgatacggccggcgtgctgtacccggaatgcgtgcggcagctgaaagtcatgctggggctaccggcctcggcggagtctgccactcccctgcccaaaactattcgcttggccggtatgagcacgtcttcgctcagtaaggcggcggctacggccgtgcagccttcactggatgacatgctcgaagaggccgacaatgcccgcggccagacctcacaggcgcgtttgcatgatgccgaggccgcactggacgctgtgcgccgcaaattcggcaacaaggccgcccagtttggggcgtgaacggctcaacgccacttacgatctcattacgccgtgagacgttcgcaggcggaacggatggcctcgtcggtggcggtggcggagaaacgcaggtaggcgggagcgccgtagaattcgccggggctggggatgatgccgatcttggcgagctcggccatatcggcccagcagtcgccggacttggccttgacccatacgtacagcgcgccggagggcatttgtgccgaatagccatatgccttcagtgcgtcaaccagcgcggataggcggcgacggtaacgcctccattgctcgtgcacagcggctgtgtccttcaggcctgcggccatggcggcctgcactgggccagggataatctggccgatctgcttgcggtattcggccatttccttgaccagccggtaatcgccggcaattagagccgtacggtagccggccatgttggactgcttggacagcgagtagagcaccaggatgccagctgccgaaccttcacacacatgtggattcagggcacatggcgtggcggagagactgaatgcggtatcggaggcgggctcgttggattcggccaccggtgcggcaggcacagacgcagcagatgcagacgcggcaggcgcagaggacgcggctgtattgcggcgcaccgaacgccagtccattaacgcatagcattcgtcggagagcaccacggcaccgatgcgacgggcagcagccacgatgtcggtcagccagtcagcggagatgacctcgccggagggattacacggcgagttgatccagatggccttgacgttcggaatattcacccaggaatcgacgtcggtcacatcatcgactttgaccacggtggcgccggcaagttgggtaccgatttcgtaagtcgggtaggagacagccggttggacgaccacatcgccttcgccaaggtgcagcaggctggccatcagcgccacggcctccttggaacccacggtgggtacggcggcagcgttgatggatttcagatccaccccgcgcagttcgcggaaccatgtatcgatagcggccttaaggtcggcggtgccggcggtgaccgggtatccatgggcgttgggggcgtctgcgccggcaaccagcgcctgctggacactgctcggcaccgggtccacaggcgagcctacggacaggtcgatcatgccacccggcacggttttggcggtggctttgaagccggcgatacgagaccagtcgtatggcgacgaatatgcgtggaagcccatgagaacccctttcttggacggtatgttcctaagatacgacgaaccctcggccgtgatagaccgagggttcaatccgaactatgcgctgtgtgcagcgcttatccgcaaatcagcttactggttctgcggcggcagcgcggcgacctgttccgggtctttgccgattggaccattggcggaagcgccgcccaaatcgccgacttcagcgaagaagttgacagcggcatccttgtaccaagcccactcgtccggcagatcatcctcatagaagatggcctcggtgggacacaccggttcgcatgcaccgcagtcgacgcactcgttggggttgatgtacagcgagcgggaaccctcgtaaatgcagtcgacggggcactcgtccacgcaagccttgtccttgacatccacgcaaggctgagcgattacatatggcatggaatcctccttaacaaatactgatacaagggtacgcgcctgttgggacgctcctcgctctcagccgttaacggccttatcggtttcggcggacagcgtttcggtcaggtcgcccttgccgaggcgcgcatgccagtagccgtagccgaagtagatggcgaagccgaccacgagccacaccacgaaacgaatccaggtgagcacggacaggttgagcatcaaccagaagttggccacggcgatgaggatcggaatccacgggttgccgggcatcttgaaggcgcgcggcaggtcggggcgcttcttgcgcataatcgggatggagatggccaccagcgtgaaggcggacagggtgccgatgttgaccatgtcggagagcacgccgatgtcgaagaaggcggccacgagcgccaccaccgcgccgacgacgatctgcagagcggccggggtgccatgcttgccggtcttggacaggccgcgcggcagcagaccatcgcggctcatggcgaagacgatacgggtcaggccgagcaacagcaccataaccacggtggccaggcccagcacgatgccgaagctgatgatcttggcggcccagtcggcacccaccagttcgaaggcggtggccagcgaggggctgtcttgcttggcgagatcggcataggagaccatgccggtggtcaccacggccacgagcatgtacatgacaatgatgagcagcatgcccacgccgatgccgagcggcacgttcttgtgcgggttcttggtctcctcagaggcggtggccaccacgtcgaatccgatgaacgcgaagaacacgagcgccgcgcccgagaggatgccgggaacgccgtacacggatggggtcatgccggtggcgaactgccacaacggctgggtcatcacgccggtgacggcggaggagccttccacggtggaggccggctggctcggcggaatgaacggggtgaagttggaggccttgacgtagaagaagccgacgatcaccacaaagaacacgatggcgatcttgagcacggtcatagcaccgtccacgcgggcgccgatcttggtgccgaatacgagcagcgtggtaaagaacgccacgatgataatcggggcgatatcgatgtggaaggagccgaacgtcaggttggtgttggcgttccagcccatcaggcgcatgaaatcgttgaggtatacgccccaatatttggaaatcacggagccggccatcagcatttccaggatcagatcccagccgatgatccaggccatgatctcgccgaccgtggtgtaggtgaaggtgtaggcggagccggccaccggaatcatcgaagcgaattcggcgtagcacatcacggctgcgccgcacacgatgccggcgatcaggaagctgatgatcacggccgggccggcgtggaaggcggcggcctgcgcgcccaccgagaagatgccggcgcccacggctacggccacacccatgattgacagatcccaccaagtcaggttgcgcttgagcttgcggccctcttcaccggtttcggcaatggtctgttcgacggattttgtacggaacagttgcatagtgctcttcttttttctctgttgtttgcgcaccgaatgcgcacaataccgacaatcgagtatagaagagcccgcgtgtcttgtctattaataagactcagagtccgcaatatatgggattaataacccactccatcaatcaatagcgcgattacagcacaccgacgcagaccggttcgggcaccaagtccactccgaacgcgctcttgactgcctgctgaaccgcacgcgccaaagctgcgatatcggccgcgctcgctcccccacgattggtcaaggccagcgtgtgctgcgtggatagactggccggcgcgtccgcatcgaccttatatcccttatggcagccggcatggtcgatgagccaggcggcggacgtcttggtgccgggagtgccgtcaggcagagtcgcgtcgaacttcggcgcatcttcgggcagggccgccgcttggtcggcggtcagaatcggattcataaagaacgagccgcagctgtggcgattgtagtcgggagcaggcagaccgtcatcgccaacgggaatgccggcggcctcattgagggaggccagacgctccagatcggtcaggatattggcctcgcgcttggcggtggccatgtcaggcaaggcgtagcgagtagggtcctcgagcatgcccttggcggcacgtactgcgagcacggctttgcggatgtcggcggtggccatacggtcgcccacttcgacgccaagcgctttggcaagctgtccgtaacctaccgtgccttcggccgagtgggtcagggcaaaggtgacggaaagcaccacgtaacgtggcgtcgggaagaatcggccggccggccggccggggccggcgtacatgctggtcttcagtgcggagtatcgatagccgaatcgaagatcggcgggtgtgaggtcgcgcgttgttttggtgtctcgatcccagacttccaccgattcgaccgaagtggcgacttcctgcccgtaggcaccgatgttctgcaccacggaagcgccgactgtgccgggaatgccggacagtccctcgacgccctcgagcccgagctctacggtgaaggccacgaaatcatcccaattggcaccggcctcggcattgacatgcacggtgcgatcctcgccctctaccggtgcagcctcgtccggcacagtgatgaggcgtcgggcgtctcgaaccaccacgccgtcaaaaggcttatcggaaacaagcaggttggagccgccaccgacgacgaccaagggcaggcctttggaatcggcatcctccacggcttcgatgagccccacgcgcgtggtcggctcgatgaaatgggcgatggggccgcccacgcccatggtggtgatgtctgcaaagcttgtcatggcttcctatcttagtggcgcaggtgcgatatcggggcaatcatcggctgaaacggcagaacgcccgcgtctgaacgaaggtggcgcgggatttctgccgttttggcggcccgaaacgacagaacgcccgcgaggggttcgttcagacgcgggatttctgccgtttctcacgcgatgcggatactgattccgcaccctgccactcgcctctggggcgaatacgcaaaaacccggccgaatgggccgggttttgtaaagctgtgatgcttgcaatcaacgagtctcgcggtgcacggtctgcttgccgcagcgcgggcagaacttcttgagctcaagacggtcgggcgtgttacgacggttcttagtcgtaatgtagttacgctccttgcactcggtgcaggccagcgtgatgcccggacggatgtcggcgctcttagccattgtcattcacctctgtgttcttaggtatagtgcgcgcccaccggttagcgggcgcgatttgtagcgaggaagaggctcgaactcttgaccttacgattatgagtcgtacgctctagccagctgagctaccccgccagagagccccgagtgagaattggactcacgacctcttccttaccaaggaagtgctctaccactgagctatcggggcgtggcggatagtggattcgaaccactgaagcacgaagcggctgatttacagtcagctccctttgaccgcttgggaaatccgccagtctgtttcccgccgcggtgtttgacctcaacaggcaacttggctatataaccacagattttccaggtatgcaaatcggcccctacgcgaaccttgttttaccgcggaattctgcggttttatcggcgtgtctcacagcgtgttttcagggcccgcttcggccctgcaaacagccccgaccaaggctgcaccccgcacttcacccaatcattttttcttatatggtgctctagaaccttgcaatggcgcggttttcgagcgatgtcgcctgtttgcgcggcacggcgcatgctggcatgctgggcgcatggcttctgatcttgtacatcacggacaatcattcgacgaccagccgctcggattcggcacgctggccattcacctcggtaacggtgtcgacgccgaaaccggcgcgatccgtcgccccatcacgctggcgaacgcctacgcgctgccctacgacccctcggacatcaactggtccagttcggacgtgaacctttacacgcgcaacgggcatccgaaccaacgctatctggaagaaaagctggcccgtcttgaaggtgccgaggatgcggtggtgctcgcttccggcgtggccgcgctggccgccacgttcaccacgttcctcaaccgaggcgaccacgcgatcttctccgacaccacctatatcgccgcctaccgcctgttgaaccagattctgccggagaagtacggcatcgaaacctccatcgtggatacctccgatcccgagaacgtacgcgcggcgcttcgccccaacaccaagctggtgcatatcgagacgccggcgaacccgacgctcaaggtctcggacatcgccaccatcgccaaactggcccacgaagcgaacccggacattctggtttcggtggacaacaccttcaacacgccgtacaacgtgcgcccgctcgatctcggcgcggatatcgtcatcgaatcgctcaccaaatacatcaacggccatggcgacgcgctgggcggctcgatcgccaccaccaaggcgcgcacggaccagatccgcttcaccgcgcaggtgaacttcggcggcatcatctcgccgttcaatgcctggctgatcaatcgcggctcggtgacactgccgctgcgcatccgccagcacaacgcctcggccttggcgattgccaagcatctcgaatcgctggatgtggtgcgtttcgtggcgtaccccggtctggaatcgcacccgcaccacgaggtggcggtcagccagctggcccgcccggactccgggttcggcggcgtgctgtcgttcggcctcgacaccaatcatgacgggcacaaccggttcgtttccaagctcaatgtgattacgtcggccgtctcgctcggccatgacgaatcgctgatcgtgttcctcggcgaggatgacgagcgccagtacctgtacccgcctgagttccaccgcggcttcttccgtctggccttgggtctggaggatacggacgatttgattcgcgacatcgatcacgcgctggtggaggccggattcgaggtgtgagaccgcaccgcgcgcatgatttcggcctcttccgccctgctgccgccgtcagtgagtcacaagatggctcggtgacgacgatggcagggctttttacgtcggcacggggacaatacctggcggtctgccgacgatgacggcacttatcgtcggcagaccgccagtttttggaccgtcgccgacacaaaacgccgatttgccgtcggcaatggtccaaaaactggccctataacgacaccaacgcggctcagcatcagcacatcgccatttcgtggcccactgccgacgctggcctcatgccacggcactcagcgtcggtagagagacaaccattggcacagcgcgacgacgctacgaacctgcgacacgggaaaaacaacataccgtcgatctactgccgtcttgtgcaaaatgtcttaagccgctcggccaagtcgccaactgagcctcttccatagggaccccaatccgttacccagtgtagatgcggtgcaacgccgaactcaactacgttgcgcgcatgcacctttatgcatagcaggcatggctgggcgtttggtgggagcagctttcggctcccctctctgagggggagcccctttccgcctagcaagagaaaaccccgactatccgcgggaacagtcggggttgttgaagttcgctaggcgactaatcagccgaggatggcgagaatgtcgcgggcgccgacgatgaggtagtcctcaccctcgtagtggacttcggtgccgccgtacttggagtacagcaccttgtcgccgaccttgacatccatcgggatgcgctcgcccttgtcgtcacgacggcccgggccaacggccaggacttcaccctgctgaggcttctccttggcattgtccggaatgtacagaccggaagcggtctgggtctgggcctcggcctgcttgacgatgatcttgtcttccaacggtgtgagcttaatcgacactgtgggtcacctcgtatctacttgtagttcgataatgccgcgccagaacgcctcaagaggctgacgatcacttgcgttgtccctttgcgctaggacacatcgtagcgcgattattagcactctgccaactcgagtgctaacgctgtgagagaaaatcgtcgaatcgcaacgctcagttgccgcggcgggcaagaatggagtccaggcctgcgcccaacgaatcggtggtcgccgctggcgcttcgacgtcggcacgctcctcggattcgtggaatgcggctcgctgggcggcgtttgcagcctcgtcatcggcgtccgtatcggcatcatcgcgctgctccggctcagtgtctacagcgtttccggcgctgacagccttgcctgcatcgacggccttggcatcgtccgcggccttgacggctcgagcctcgtcaatcaacttttccgccactgcgggttcgacaggttccgccttggacacctgacgggtcgacttgatctccaagctttccggagcgttgtcggcgctacgtcccccacccaaagtgaaggagatgagatcctgcgaggtggacataccgaagacgtccagtgctcgggcagggcgtacgctggccagttccgacgtggcatcggccggcagcggcatcgtcgcgctcatcgcgctcgtcacgcaccgtaagcgatggttcaactcgaggggcgacggacttgtccgactcagtcggcttgtctgtgcgagcggaggcatcaggtgtggcggaagattcgctggtttcggcagcggacttacggtcggcggattcatcgaccatagcagacggctcggcggcaggcttatcggcggcggactgtgcagtatcagacttctcggactgtttggcgtgctcttccgcggcctgatatgcggcggcggactgacgcaacgctttggccttggcctgctcaatctcggcatcgcgtaacgcgcggcgaatctgccgctgttccatgacctcggtggcagcatcctcaacatgctcggaaagcttctcggcaggcgcagttacggccgcaaccggttcggccttgttcacacgcttgctgtccttggactcggcagacggtttcttggaccagcccgtaccgctatgagcccgctcgtagcggaccaccttgcgctcccattgccgggcctggcgtgaggcattggctcccagcaccagcaccagcagcaacagcacgaacggaataagagcaagcagcggactgaaatgcagggggaacgatacggcaaacaccaacacggttatggcaagcaggcatacggcgagaatctgccggcggcggatggccgcgcggcgcagttcccgcacatgggcgatgtgctcagatgtcagcctcgctgacggtgttgatgctggcattgctgcccctttcgccttatgcggcttgatgtctccgaatcgtctgccgttctctgcatcaacgatatgcagggaaggcgaataacgatcctgccggtgctcgtccacacgtttcatgccgttggccgtacgtacgggcagccatacaacgataataatcgccacaatcaccagcacgacgacagtgctcagtgactcataacccatagagtcaaggataggagacgtgccgacgaactggggctttccgtccgggcgtgtcggagcggaattcttccggtcgacgcttatctggaaccggcggcggcgagtctggcggcgaacccttgccccatatcttcagccaacagcgcaaacgttacgtggtcacgccactggccattgacatacatataccgctcgcgcagtccctcatgatgggctccgaccttacgcaccacagccaaagaacgcgcattatccggcagaatggcgatttccagccgatgcaacgcgggcccgaatgggtctccgagcgcccaatcggcaagcatggccagtgccattggcgcgaatccgtggccggcgcaccgttgatcgacccaataaccaaccacgccggtacgcatggcaccatacacgatggctcccaacgaaatctggccgacgatacgcatctggtattcgatggcgaagatcacgccgacgccatgctgctcgttacggcgctgccgctgcacccattgattgaatgtgatggagccgccatgcatcgggtcaccggattcccaaggtgccagccagtcgttgttgcgccagcgcacttcgttccagccgtcctcatcatccatggtcagggggcgcaggactatcggaaaaccgggatgggtgagacgtggcgggcggatctggtggtccagcttgaacgcctctttaatcgactggaaaactgacacggcctttattgtagccatatgaaggtcttgcgccgctaccgtggccactttcgttttacgatggaaacactagattgtgcggtatgagcgaagtgggcagtggcatgaatatcggcagcgactacagcggcacagagaaaacagagaagacggataaagcgacgctgcgccaccatatactgtctcggcgcaagcgcgttccagcggaagaacgcggagcggccggtgaattgctggtgcgacggttcccagcacacatgattcaggatggtcccacagtggcggcatatgtgtcgatgggttcggaaatcgaaacccggccactgttgcgatggctgcgggctcatggctgccacgtgttggtgccaaggttggggtctgggttggaaattggctggagtgtgctggattcattggaatcattgcgctcgatggatgcagtgggtggcgcgaacaatgccggtagctgcagctctcccagcaccgtccatcacagacccgatgagccaactggcgcagttctaccgcccgaagcgttggagaaggccgatctggtcatcgctccggctttggcagtggacccgcagggcaatcgtctggggcgtggagccggctggtatgaccgggccttggctcgccgcaagcccgcatgtcccctgattgcggtgtgctggccgtgggaggtgttggacattgatttgccggccgaaccacatgatgtgccggccgacggagtgctgacgccggagggataccggcggcttagctcatcgggcctgttgagctggccggccggccaagatactcggcgcaagccagactgaccaaccagccacgcacactggccgatggaaccagagtggcaacagcaagctggctagtaagaccgtaacgccaatgtgtcagggcggcgactaggatatgaacggttgcgtggcatggcgtttgggccatccgcgagaaatatgactttgttggaggaatccgttgcctacctatcattaccgttgcaagaactgcggctatgacttcaccgaacagcagtcgttcaatgacgacccgattaccgtgtgccccaagtgctcgcaggagcaggtgcgcaaggtgtattccgccgtgccgattgagttcaagggtcacggcttctaccgcaccgacaaatccggcaagtaaggtctgtacacccgcttttcctctgtaaacgacggtgtcgacggcggtatgccgcggatattggcactacgggcactgtctgttgcacgggtttgaagcgttgtggataacttggcaagctagaaccacataggtcgatttggcttgcgcttacgaaaaacttcaggtcaccatggttgcatggtgaccttttcgtttattaagccgcctgcgcgcggctcattgcggcgacggcgcatggcggatgccttgcgccgactcactgctgcgttgtgcgtgggactcgcagtgctgtttgggattgaagccgtattggccgtggtggagaccgagccgatggtggtggccgcccgctcgattcgacggggtgacattattctggccgccgacgttcagttggctgatatgccggtatctgcggcaggcccgtcttggacaggcaatattgaggatgtggtgggcaaggtagcgcaaatcgatatcgaagcagccgatcccatttccacgcatatggccagagatgcgcccgtagcaccgaccggcactacggtgattgaagtccgcttggccagtagcgtcgacgatgtattggccggcgatcaggtgagactggtttccgccgtcggttgcgaaggcgctgattgcacgctggccgagaacgccacggtgatgaatgtcggcaaaccggatgcgattggtgcattgggaggcaacgaccgactggtgtcgttcgcaatgccgccggaggccgcggccaaggttatggagctgcaacaggccggagcgattatggccgttgtgcggtaggaagcggaatcggccttcggccgatactgtgttttccgcagccgacaggctgcggaaaacacagtgttggggcgcacagagtgcgccccaactcctactcgcgctcgttaaaaacggcccaatgcggcggcagttcgccgaggatgcgtttgtcgtcgtcggattgccgttgttggtcggtctgcatgtctccgggctcgagtttgacaccgtcagcgtcaaactgctcagtgcccttcatcaccacgcgcttgtgcttgcgcggtgtgcgccgtgtagccgagtattccgccatggttattcaacctcgcgatagatctcaccgatacggctgacgatacggtcgacttccttatcggggttcacgaaggcggcgacactccagacggtcatcacattccagcccaaggaaatgagatcctgtgccgacaaacgatgacgcctacgcgtggattgcacggacataaagttcgcgtcatcggtctgcacggccaaggcaaacggcttgtccttcaatcccaccacgagcggaatcttcacgcccttgtcgaatccataatcaacagcagcgttcagtcctcgcgcgcgcaacctgtcggcgatatcgtcgaacagcacgttgccgcctgccgcatcacgcaacggaagcaccggacggtcgtcaagctgttcggcccacgtcaacatggtcttcaggaaccgaggaccggattggtgcagtcgttcttcatccaaatcttcggaaccaaaggccgacacaatatccaagctgtggtccgccaatgccagggcatccagcaacagtccgcgaccgcctgcgctttcgagcggaccgaactgctgaagcagacgtccgtgcgtggttttcgcatagcacatcgacagaatcacgtcagtggcacgacctccggccacgtcacgcaaggaaaccaaccgcacatggcgcaggaatcggcccatcgccttggatttgcctgccaacgacttcaattcggcacccaagcgtgtgcggaatgcgtcggtcaacatcacgaccacaagtcgatagctggaaggaaccacggcaaaaccggcggcacgttgcgtaatcagacgcaccacttcatcaatctccggctggctggattccaccagaccagaagacataaccggcacaccgctcgcttccacacggtggaatcgcacctcaccggcagccggctcggtggccacatcatagcgaacaggaccatatccctcggattcaaggaatgcggacaggcgcggcgcacggcgagacggggcagcatccacctcgatatgaggcaacgtgtcgatcagctgcttgacgctttcgctggttaccgtcgcgcagtgggcgatcaccaccacctgctgcacgcggccgatgatggacagcaactcgatagcgggaatgtgcgcgcacgcatcgagaatcgccacatcagccagcacacccggctcggtgagtgcggcgagcgtacccggcgcggccaccagaatcggcttggccgcggccagaatctccggatgatcacggcgaatcctgctcagcgacacactggcgcgccctgccagcacggtgtgcatctggttggcttcctgagtgcgggagaacagcatgtcgcacaggcgacgcatggattcctgcgacaccatcggtccaatggagcgcacgtgctccacatcgacctgcgcaaagcggtcggatgcggcctgcagcgcggcaccatcctggttggagatgatggcggacgaacgcacaatgtcctcaaacacggtggtccaccaggccagctgcacttcgccgcgcacctgctccacgctcactcggcgagcgttgagatcggcgaccagttcgttcagtccggcagaggcgaattcctgctccagcaggcaacgctccggcaaggtgtccagtgccttgcgatcatccagcagtgctttcaggcgtgcttccaccttctcgaaatcggcggtttccagattgccaccagcgggtgtggtggaaagcacggtatccagcgcggtcatattgctgaccagcgcctcttgggtggagatgatctcgtcgagcttgctgggcagcaccggccaaccgccgtgaggcacgaactgatgccactgctccccttgcttggcgactaccttcaacgcttcgtgcaagtcctcgacctgcgcgccgacgcgcagcagatccttggcttccttgatgtggcggcggcgctcccagaatcccatcgacgtgccctcggccttgcgctggctcttcggcttggtggcctcgatcatggagctgatgtctcgctcgaaaatctccggctggaacacgtcaagcactcgtcgcagattcttcaaaaccgtaacctgacgctcccactcgcgggtggtgggaggaaccgggaatccgcaggtctgcacggtgcgtgccacctgctcacgggtggcgggcaggaagcgacgcagcaaatcgtccacgcgctggtaggcggttactgcctgttcttcagtggtgatggacgccttgtaccatgcggtgtcttccgggccgatggtgtattcgccgagctcgccggcgcgttccatcttgccgatccatgtgtcaatatcgttggcgatgctcagggcacttgactcgtcaagtcgaacgtgggtggcagggtgcgtcgggagcacggagatacgggccagattctgaatggtctcgtatgcggacacattccacttatcgttgcccccgtgcaggtcgcccagatagcgggtcaagcgcgagcgcacgcccacgagttcgtcggccagctggtcgaatcgctgggtggcgactccgggctggaatccgactgcggcaatcagctgcttatcaagcgcggcgttggcgtgttcatcggatacatccagtacctgcgccttcatctcattggcggaagccgtctggatgaacagacgcttctgctcggccacgccgggcacgtacagcacggaacgaccattcatcaggcagcgcgatgcgatggccacagcctgctccgcggtgcccttcgggaaggtgccgtcgaccacgatgctatggccattggcagcaagtgacgcggcatatcgcaccgtattgtccacatcgccgacttcgtactcggcatgcgggtctacgtcgaaaggactgtattgcggaatattggcatctttgagcgcggtgcgggcggattcgtcgccggcaagcgcatccaacagcacattgccggtggggccgttctccagctggtcgatgaactgtcggctttcgctgatcatctgcgacgaggggtccatgaagcatccgagcacaatctggcgctcgacggcgaagtcggagatacgctccgatgcttcggacgaaatacgggcgaacatcgcggaagtttcgggagtgccactgtcatagctggcaccgtcaaacagggaatcctcatccaggaacaccccctgctcacgcaatgtattgacgaacgcggcgttcagggtcacgcgaccggtgaatcgaatggtggtcgacaagccatcaccctcgatcgtgacgcttaccgggtacaacagcaccggcagcgcgttgcccttccacgtggccacgccgaccacgagcgacaactccgccacgccggaaatcctgcgtttggcggcctggtcatccagcacgcgcccaatatggcgttcggcggccttaagcacacccgtgtcgcggaacaacgaatccaaccggacatggccggaagcgaacagctgggcgatgccggagggatgggcatgggtcatctccagcttcgcggccagttgattcacatcctcgagcggcgatggcggctgcatgctgcggtattggtcacgccagcgacggatgcgattcagaccttccgtgagattctggttctgagtctggctctgggtcatctctcgactcactttccaaccgcttcgcggtattcctgatagcccttgttgtgagacagggcttcgtcaatatcggcctcgccacgggcggcgagccaagaatacatgtcgtcgtacaggtacggattcatggcgaggaacgccagcaattcgggatgacgggcgacttcgaattgaacattgaaatcttgcgtggtttttgcctcgtcagaggtcaggccatcgacttcgactgccggctcctgtgctttcagctcgcccttggccacgcgctcgaacaccgagccgggctcgaagactggggtgtgcacgcccgtggagtcgatatcatacgcttcggataccgactgctgggcggtttcggcagccggctgctggtctgctacgcctgctgcggtggcttcttgatatgcttcggctgcggtccgctgctgatcgtccggtacgtcagctgccggctggtcggtttcagactgggcggttgccggctgagcggtctcaggctgggtgttttcagattgagcggcttcggcttcccgggcggcttcaggctgggcaacttcagcatgctgttcgacagtgtccgccggctgagaatcgccggcattcctggtattcggagcggactgaacgttttcggctgacttgcttgcgccagccaccacatcggattcaacaaccgccgccgacgccactgccggctcgcttgtgctgggagcgtgcttaacaacggcatgggcgatggcatctactggaacaataccggagatcctgctgtgcttggatgcaggcgttacaatcgtcgactcaggttcggtctgccgcttcggcagtgccacggagttcatggcctgctggtttttgcgttcggtctcctgctcggcatgctgggccaacgcatccgcgaacagatcacggggtatggccggctcatcgtttttcgtcactggctgcgtgatattcagcgagccaagttcaagctcgtcgaccttgcgtcgaacattatccgcgctgaagatggcggtcggctcgccggcccgcaaatcaagaatatcgtcgacggacatatccgccgcatccggctcctgcggtgcttcgtgaaccgcatagccaaacaaatcaggcaccttgaggtcgagcggctttgccactggatcgtcgacacgaatgaagtccgcaggcacatcgccgaactgcatgcgcatgggagacgtcggcaacaggaactcgacattggccggcaagcgcaacaaatcgccattttcccgcaccacatacgatccattggtcgatccaagatcacggaccgaggccgtgccattgctttttaccgtgaacatggcgtgccgtttggacatcgatttggtttgatcggcgacgtcaaggcgggtgttgccatcatcggcaagggggcgtaacggcttacggccgatttccacgcactcccccggcttgacgctgatccggtcgacaccgttgatcttcaccgtccactcgctcaccgtgaccgccttcctggacacactatttgaccacactacgtgccattgtgtcatcttttaccggcttttggcggattactgggcacagaattgacaactttcgctcattgccagctttgtgtttccacgccggatcgcgttctccgcctcgtcctcgtcaactagtctactcagtatgcggaaaccccgcagcctgaaacacaggtgcggggttcctcgaaaagctgtgattgcggcttatgccgcacaaatcacttgagctcgacgctggcgccagcctcttccagctgagccttggccttctcggcatcttccttcttggccttctcgaggacggccttcggagcgccgtcgacaagagccttggcctcggccaggccgaggttggtgatggcgcggacagccttgatgacctggatcttcttgtcgccgacggcggagaggatgacgtcgaactcatccttctcttcctcagccggagcagcagcgccagcaacagcggcaacagcggcaaccggagcggcagcctcgacgtcgaacttctcctcgaaggccttcacgaactcggagagctcgaccagggtcatctcgccgaaggcttccagcagctcatcgttggtgtacttagccattatggcttcctttcaatcttggcggcggacgaagtggtagatccgctgcctaataaaccttattgtttaaattatcgaagcgactgattcatgccgtgagggcgtaaatcaggcagccttctcctgcttttcgcgcagggcgtcgatcgtgcgcacagccttggtaggcagagcgttgaacaggtacgcggccttggccatcgatgccttgatgtcgccggcgaattcggcaagcagctgcgggcgggacttgaggtctgccagcttcttggcgccctcggcatcgtagacagtgccgtcagcggcggcacccttgatgacaagagccttgttgtccttggcgaagtcacggatgaccttcgcagcctcgatgaagtcgcccttcacgaaggtgatggcggtcgggccggagagaatctcgtcgagaccctcaatgcccgcttccttggcggcgatgcgtgccagcgtgttctttgccacggtgtaggaagtatcgcggcctagcttttcacgcagatcggaaatctgcggaacggtaagcccgcggtactcggtcaggtagacggcgtcagcgttacggaattcttccgtaagctgagcgactaccgcttccttttcgggcctcttcatggcgttccttcctaagtcggccgttgacttggagttcggaactttcggccgggcaacaaaaaagccctgcgcacaggcagagcaatataatctcgcgaagcgaccttcgccggcccttgacgggcttatatctctcaacctgcgctggcttggcgaaccaaacttcggaaatgcactcgcgcgcacttcaaccaacggtctgtggtttacggatgattagattacggatggtcagcgacattgcagaattcgggcgtgtcgcggggcattacagcgtggcggcgtactgggctacggacgcggtgacttccttcagatagtcgagcgagcgacgccagtggccgggcacctcgatcgaatggttggcatccgggtattcgtgcacgtgcggggtgagcgcgttggcgcgggcttgatcgtagagcgggtcggcggtgccggcgcagatcagcggtgccgggccggagtatcgggagctggcggcgtgcgactggccggcctgttccgcgcggatgatcgcccttgcttcggccacgctcggggcctcggattcggcgacgatatcatcgccgacagccggcaccggaatcacccgggcggatggatcgaagtcggcgtgatgcagcaccggggtcagcagcacgaacggcagaccgtagtgtgaggccacatgtgggtaggtcatcgtcgtcagcgacttgccgatcagcaacaggcgagggccggacggggtgtcggaatcacggttcggcgagccagctgcgccatcggccagcacggtagcagaatcatcggcggcaacgccatccccggaatcaccggctttacccgcgccggactcgcgcgcggcggccacccagccgtcaatcgcctgattgaggaccggaatcaccgtggacaggtcgtcggaagcgttgcgtacgttcatgcggtcgattcgccagccggcctcgaccagagcctgggccgaccagtagagcagcggacggtcgcagttgtagccggtgccgggcatcagcagtacgcggccgtactcctgaccgggcttgacgacattcttcttccaagaggtgatgctgacttcgacggccggtttcatcgcgcgccttccttccacgggtgtgtcctgcgtgtcccctgagttgttccgaattattctggcagtcagtctactcccggacccgttcacgttgcctccacaagctataatcggccacggttctgattgggtgcgcagcgcctgacgcgcgttgggcaggccgatcagggcgagtcgcaattctcgccggggccagccgcagcattatgcacgcggtgcgcagccccgcataaacccaaggaagtagagagtaaatggagaagttcttccatttgaaggaaaacggcacgaccgtctcgactgagattctggccggcctgaccacgttcttcgcgatggcttacatcatcgtcgtcaacccgcagatcctgtcgcagacgggtatgccgtggggcggcgtgttcctggccaccatcatcgcggccatcatcggcaccctggtcatgggcctgttcgccaacgtgccgtacgcccaggccgccggcatgggcctcaacgcgttcttcacctacaccgtgtgcttcggcctcggcttcagctggcagcagaccatgtgcatggtgttcctgtgcggcctgatcaacatcctcatcaccgtcaccaagatccgcaagatgatcatcctggccatcccggagtccctgcaacacgccatcggcggcggcatcggcctgttcgtggcctacgtgggcatgctgaacgtcggcctgatcaagttcactcccggcgatccgaaggccgccgccaagggcggtgccgttgcggctaccccgggtctggccaactttaacgacaaggtgctgtgggtcttcctgatcggcctcgtactggccattgtgttcaccgtgatgaaggttaagggcggcatgctgctggccatcgccatcaccaccgtaatcggcatcccgttcggcgtgaccacctggtccaactcgcagtccatcagcgagaccttctcccagctgccgcagaccttcggcgcgatcttctccgccgagggcttcccggcactgttctctgatccgaccaagctgccgctggtcatcgtgaccatcttcgccttctccatgtccgatacgttcgacaccctgggcactttcatcggcaccggccgccgcaccggcatcttctccgccgaggatgagaaggctctggagaacggccacggcttctcctccaagatggacaaggccctgttcgccgactccatcgccacctccatcggcgccatctgcggcacctcgaacaccaccacctacgtcgagtcttccgccggcatcgccgcaggcggccgaaccggcctgacctccgtggttgtggcgatctgcttcgccttgtccgcgttcctggccccggtcgtctccgccgtgccgtccgccgcaaccgccggcgtgctggtgatcgtcggctgcatgatggccgcttccctgaaggaagtcaagtgggacgacatcgccgaagccattccggcgttcttcgccgccgtgttcatggccttctcctactccatctcctacggcatcgccggaggcttcatcatgtactgcatcgtgaagacctgcaagggcaaggccaaggaggttcacccgatcatctggactgtggccgcgctgttcattctggacttcgtgtgcatggcgattctgtaacgctgattgacaacggattagcctttaaggattaatccgccgccatacggcataaaggccgggctctcacaagggcccggcctttgttgttgccacagtgatcaacgcccatgagtaccttcgatgatcatccgccattcttgatgcatgggaatagttgtcaaccgacaactaaacgtacatggcggcagcacgagtgccttattcaacatcgaaatatgcagcgcgaagaagccgaaaaaccaaaaaggcttctataccgaatgaaacggtatagaagccttttggtttgcgatcaagcccttctcacccgagagaagctagagaacgatcagtcctcgaatgccgaaccgttaagcgggaagccctacgggcttcccgtaggtgaggggagcggctatgccgcgaccgatccgtgagagggatttagtcctcgaacggatcaaagtcgcgacggacgcggcgacgcgggcgctcagtacgctcttcgcggtcggcgcggtagtcgtcgtagttgtcgtcggtggcgtagcgcgggttacggtccgagccacggccacggccacgggaaccgccacggcggtcatcacgatcgccacggtcatcgcgatcggaagagcgacggcgacgcggacgatcatcgtcacgggagtcgcgagcatcacggtcatcgcgatcgtcgaagtcacggtcggcagaacgacggcgacgcggacgatcatcatcgcgatcatcgcgatcgaagtcacggtcatcggagcgacggcgacgcggacggtcgtcgtaatcatcctcgaagtcatcggagcgacggcgacgcggacggtcgtcacgatcgtcgaagtcacggtcatcgcgatcggaacgacggccacggccgccacggcgatcgtcacggtcaccacggccacggccgccacggcggtcatcgcgatcgccacggctcgggcgggcgttgttctcctgatcctcgaaaccaggaatggccagggagatcttgccgcgatcatcgacaccctgaacgatcacctcaacggtgtcgccttccttgagcacgtcttcgacagcgtcaatacgctcgccgttggccaggttgcggatctgggagatgtgcagcaggccgtcggtgccgggggtgaggttcacgaaagcgccgaacgacgtggtcttgacgaccttgccgttgtaggtttcgccggcctcgggcacgtgcgggttggcaatctggtcgatgatggccttggccttctcagcagcctcgccaccctcggaggagatgaagacggtaccgtcatcctcgatggcaatttcagcgccggtgtcttcctgaatctggttgatcatcttgcccttcgggccgatgacttcgccgatcttctcaaccgggacggaggtggtgatgatgcgcggagcgaactcgctcatctcggccgggccgtcgatgcactcgttgatgacctcgagaatcgtggcgcgggcttccttggcctgctgcagagcggcggccaggatgtcggcggggatgccgtcgagcttggtgtcgagctgcagggcggtgatgaactcggaagtaccggccaccttgaagtccatgtcgccgaaggcatcctcggcacccagaatatcggtgagggtcttgaagatgtgcttgccatcaacgtcgccggacacgaggcccatggcgatgccggcaaccggagccttcagcggcacgccggcagccaaaaggctcagcgtggaggcgcacacggaacccatcgaagtggaaccgttggaaccgatggcctcggagacctgtcggatggcgtaggggaactcttcgcggctcggcagcaccggcacgagagccttctcggcgagggcgccgtggccgatttcgcggcgcttcggggaaccgacgcggccggtctcaccagtggagtacggcggcatctcgtagttgtgcatgtaacgcttggactgcggaccggacagcgcgtcgatctgctgctccatcttgagcatgttcagcgtggtgacgcccagaatctgggtctcgccacgctggaacagggcggaaccgtgcacgcgaggcacaatgtccacctcggcggacagggtgcggatgtcgcgcaggccacggccgtcgatgcggtagtcctcggtcaggatgcggcgacgcacaatctggcgctgcagttccttgaaggcgttaccgagttccttgtccttctcggcatcgtccatatcggtgaactcgtccgcgagcacctcgcgcacgtgctccttgatctcgtggatgcgatcctgacgcggcagcttctcggcgatggagagcgcctcgtccagatccttgtgagcgatctcgtcgatacgggcatacagctcgtcggtgtactccgggaagagctggaattccttggtctccttggcggcgatcttcttgagctcgtcctgagcctcgcaaatcaccttgatgaacggcttggcggcctcaagaccaccggcaacgacttcctcatcgggcttggtctgaccctcgtcgtagatgaggtgccaggcgttcttgccggcaccggcctcgatcatggcgatggcaacatcaccgttctcgatcacgcggccagcgaccacaatctcgaacacggcgcgctcacgctcgctccaacgcgggaaggcaacccactggccatcaatcagcgccagacgcacaccggagaccgggccttcgaacggcagaccggaaatcatggtggaagcggaagcggcgttcagggcgatgacatcgtaagcgtcatcagggttcacggcgagcacggtctcgacgacctgcacttcgttgcgcagggtgtgcgggaacagcggacgcagcgggcggtcgatgatacggcaggcgaggatggcctcggagctcgggcggccttcacgacggaagaacgagcccgggatcttgccggcagcgtacatcttctcttcaacatcgacggtcagcgggaagaagtcgtagttctccttcgggctggaaccggcggtggtggtggacagaatcatggaatcgtcgtcgaggtaggcggccacagcgccatcggcctgctgggcgaggcggccggtctcgaagcgcagcgtgcgcttgccaaacgatccattgtcgattacggcctcaacggccttgatttcgggaccctccatagggttcctccttctttaattttctattttttcctacatactgtgttgcggtttggcgactcgcttgaaccgcaactgtcctcttcagcggacgtcacataccttgtttcgactgaccccttggccgtcgttcctcgtgtcaaccccttcattcgggttctcctgtcggccttacctgctggcctatcctctaaccctcttgccgttgttgccgttggctggcgatatgtaaaacgcccgagcaccatcctaggtactcgggcggaagtcttcaattatcgacgcagacccagacgctcgatgagggaacggtaacggttgatgtcaacgcgcttgaggtagtcaagcaggcgacgacggtcaccgatcatcagctgcataccacgacgggagtggtggtcgtgcttgtgctccttgaggtgctcggtcagatcagcgatacgcttgctcagcagagcaacctggacctccggagagccggtgtcaccttcatgggtcgcgtacttagcgatgatttcctgcttttcttcagccgtcagtgccacggcatcctccttatattgctgcgcggtgctaccggcccgatgccggcgcgctctctatccgcgggcgaaatacgccaagggtcaattatacaggagcaccagacaccacgaatcagaccaacgtcagcaggccgccaaacatcacaacaagcaaagcaatcgtctcaatcacaaaaaaaagataaacgacgcccaactgcgcgtcagcacattcaacggcgactcttttttaatcgtcaccaacaatcccacccacagcaccgcgaaaacggcaacgccaataccaactgaaataatgccaagattcgccgcattcgccaatgccgacgactctccgtacaccacatatgtcgcataccaaaaatcaattttcagaatgcgcaggccggcaatgagttgctccgccgccaagccaatcacaaaaaccgcgccccacaagcgccgatgggcgtcaacaaccagcagaccaaggccggaaacggcaatcagcgtcaccgtccaggcaacaaacgcggcgccgcgcggctcaagcgcgctcaaattatcaagcagccactgcgtatcgttcaccgcaatcgcacgcccccaccaatacggcaccacaatggccgcaatcaccagcagcgcataagccagccacaatgcaggatgcgagcgcttacgctcaatatcggccagcgacagcgtcgattcgggaatggacgccaccggatgcttggaaacatcgttatgtttggaaacatcgttgggcatgggcgaaacaccatcggaccgcgtatcgatttcagcctgcacctcaccgctcgcctgctggtcgaccggctgtttctccacgctggaattcaccgccatctacgtttacctcgcgttcgttgttcgacgccacacctgtctgcacaatgcgtcgtctcatgccgcgacgcccatgctaggacggtattgtatcgtgagtgcgccatacgataatgacatggcgccggacataacgccgcaatacctgattttcgctaatcgcaaccatgcttcggcggacgacataagccatacatatgttcataagggcgaaccatatccgaattactcactccgctaacatcaccacataacggcaacatagatacacagccatacttgatatcaggagaacgccgtcgattcgaaatgaaaactgccagccgcccacacaccagctcctttgtttccaaaatcgcacattctacgccgatgtcatgctccaccatgtctcacgccgcggtctcaacataacaggatgggttgtacgaatccacgttgccgagcattcgcacaacccaccattgcgacacatcactgattccgcacattcaatcgctgcaaccaacaggctgcggcgatatttcagcgcgaagagcggcgtatccgaatgacactgatgccagccagcatcagggcaattgcagacagcaccatcggtgttacggacgaaccagttgatgacagttcagatgaattatcatcagcagtagaagactgttgctggccgccatcaccggtctgatcgccgttacccgactggttaccgtcaccggtctgatcaccaccaccaggatttccgccatcaccagactgacggtcaaccgccaattgcgcgagctgcaaactcagtgcacgctgcggggcatccacctcattttgcgtggaaggatcggatgccaacgcctgctttgccttatcaagtagcgtgagcatcttatcccactcatccataggatattccgcagactgcagagagtcagcctgatcaatggccgaacgcagcttagacgtatccacagctttgccgtcagaagtcaacacgtcgctcaagtcatagtaatcaaaatcgacataaccacccgtattctccttggcgtaattgaacaagccgattcgataccccttaaagtgcgacaagctccaatcgtaagtcagcggcccctgctcgtcgccaagcttggaccattgcttaccgtccagactgtaccaatactgaatcgtcaacttaccactcgcattatccagtgtgttgtccgacttgatccacacattggtcgcatcatctggcaatgtcactgtgccgcccgatacaaaggcctcttcagcgtcacgatcaatcgtatcgtcaacgatattaccgtccgcgtccttcacgccattgtcgtagacacgcttgaccacgcccaacgttcgctgtccattttcttgacgcacagcggcataggcaaaactacgggtatatgtagcgaggcctgcggtgtctccatccttcatatgactgacatccatgtgggtttccacagacatggatccgccaaaggtacgctgcgacaaaacgttacgggcggtttcaaaatatgtcaggtcgccataagtgcctttcatatatttggccgtggcggaaaccttgtgcccattggtcaaacgcaaccagccttcacgatcagtgagagaccaatatcggttatctggattatgtccccattcccataccaaatcaagattcgaaccattgggttggtattcttcggcgaccggatattccttctcatcagcaagaccgatcagggaaatatcgtcgatgacgtaatccatgcacgtgccttccgcaccccacgcggtttcgacaatgagtttggaaccttccacattagcgtcggatgggatggagaactcacctgtgatagtagtcgtctccccacgtttcactgttcctgtggccacacgattaattgtgccgtctgcatattgaatcgccacataaaacaggtgggaagtcacagccgatgaatcgacgccgtccatctcatggtcgtatcgaatcgttgcactggcacgatatgtcacgccctgctgcaattttccatccatagattgacccgggccagcgccattgtattcgccacgattcgtcacagcaagactcgtggttccagaaagagaaccatccgtaatcgcggtaagcgtaccattccactgaggggtccacgattcagtcccgttttcgaaatcgccattgtccaccagctcgattccaatcagagaatcgtcaacctgaggaggctcctccagagtccaccaatcctgatcctgataagactgatgaggcgcgtcattatcaaaatcgtccgaattgaccagggaacgctggcgaaccagattctccaaatcagcaggcaaatcaatcagtttgtcgtaggtgtccgacgcgcttacctgattattgtccccaaacacaggccatccgtcatcaccccacgttgcaggaatcaaaccgggaatacgtccggtcggatatgtgtctcggaagaagaatccatgccaagacgtcgtgccatcaccgttgtcgacttcaacaaggctaccttgtgcgaaagcacctagataatactttttggcttcgtatttggagccatcaagcaaatcagtggtgcgcagcagcatcaccgtacgaccgtctttgccccagtaaatcgttggagtatagaaataatcaccgattttgaaagtctgagatccttcaaatccggtaggagtctcaccaagatcatcagtgaactgttcggcagagatgatattctcatggctctccaccaccgtggttaaatcatcggacagcctatattggttgacgccggagataatccaaggactcccttgctcatcaaaatacaatgacggatcatggaatccccgattaagggcaatcttcgtccaaggaccattctcaatatcatcggtgtagtagatataagcgccattaaggttgttcgtattgaataacacgtagaagcggccattgtgatagcgcagcgacggagcccactcgccttcgccatacgagctagctccattgcgcaaggatgaagcatcgctcatagaaatgcgatcatacacgtacgtgactatccaccaattgaccagatcataggatttcataattggagatccgggactgagctccatagtggtactcaccatgtaatacacatcacgaccgtctttgttattcggatcgtccttcgacacacgaataacactgatatccggaacatccgtgttcaacatgggaatggaatacgtgccatcaccgctatcagtcgtggtgtaactgccatccgatggcgttgaagatggcgttgaatcatccgcaaagaccggcattggcgccaaaatcaacccacaagtcgacaacaccgcgatagcactagccgaaattttttgtcgtaaataattcataagtcttttaacctttcatgataagcactcaacatcgagtgcgtattccaatagcatgcccgcacaaatcagcaatgaatgacgataagacattcccgcatatggataagtgatggacattaccactgccaaaacttacgcttgaacaagtaccagttctaggtttcatgtgcggtcatcccgaggctgccgctacgggatgaccgcattaccaagaggtaactagcgcatctcgcgacgcactcgcgctacgatcacaccagtgagagccaagcaagcgacaatcacagcaccaggcaagacagaggaaccggtttgtgccaaatccacgccatcgtcattggagccgtcggcattgccatcagtggaatcatcagccagcttcagaccggcacgtgcactattcaatgcagcaagcgcatcttgaacctgctgttcagtagcggattcatcctgcaataccgcctgagccttctgcaatgcgtcagcaaacaccttccagctctcttccgtgtaatcggaagcgttcaggctggaattctcattcactgcgctctgcaaatcagacttgtccaccggagtcgaaggagtttcatcctgcgactccgtgaaagtgtacgtagtgatgtcgtacagctcatcctgagcattcgcaccaccatcggatttgaaggagaacaccacatgatgcacccctgtcacaccctcaagggtggtcgtgtaatcggcgtactcggatccatcaccggcaggaatcgaaatagaagccacaggttcggaatccggatcatcaagacgaatctcaaggatgcctccggctttgccagctgcagtcacagtcagcgaagaggcgccgttattcccgaaatcgacattcgccaaagacgtccactcaccattattaatattgctgagcttctgaccttcggaattgtctgtagtcatatcgaccacgcgcacaccagaagtcaggtcatatgcgttctgaatgccggaatcccatgcaatggtggaagctggaatgcctccatcttgatacgcgtccagattcttcaccgaagagagaccctcatatgtcattgcaatatcggcaatggaaccatcctcgttaaccgtaatcggatcgagatgagtatttcggtagccatgcgccgcgtcaagattaccgccgttcatcaattcctttgccaccgtttgcgcatggtaggtcatataccactggtcgccaagttgaaccatcgcgtgatgattgttgccgccaacaccgaaatacgtgctcggattcttcagaatctcaccctgataagtgaacggccccatcgggttgtctgaagtcatatacgcgatattgccgtaaccgaccgtgttaccatcaattacgttgtcatggctgaaattagtgcaatacgagtagtaataagtaccacctatcttggcaatcccggagtcttcaaacatggcaggtgcgtctatgacctgagcctcaccttcggtatgcagcatgtcatcggacagtttaataacgcgagccgtgttcggatgttcttcctcgcctgtcggaacaccacctccgtaatacaggtagccctgcccgtcatcatccacgaacaccgcgggatcaaacagccagaccacaccagcggattcaggagtaccgcccttaatcaacagctcaccggtttcgtccttccacggaccaacaggagaatccgaggtcagcacaccgataccgctgccgccattggcgaaatacaggaagaacttctctttaccgttgatggtcttatgagcgacggcaggagcccaggaattgctggcccaggtggccaccccctgttctccagccacacgaatgtaaccctcattacgccaattgaccatgtcatcactggacagaacattgatggtctttacttgagcgaacgaattgtccttgatctgcccagtactgtcatattcatagtcataattcaacgagccatcagcattcacagaagtgccatcacccgtagtgtagatatatacgcgtccgttgtattccatagcccacggatcggcgccataccaataatcgataatcgggtttgaatagtcgccgaaagccttggctgccgttgccgtacccgtagtcggcggcacgaatgaggaaccagaatccgaaccggttacggaaatgtcgtcgacaatgaagtcggcattgctcgtgccatacttgttttcaatcaccagcgagggactggtgaaatcaccactaccacctaacgttccagtacctgaaatttgtgtccactcacccgctttcgccgttccggtcgcaatctggtcacatccggaaccattacccgaacaaacagtgatattgaattcaccgtcttccgtggccttgacccacatacttccggtatatgtctgtcctttttccaccttgccatcaagagactggattgcaccagcatcagaggatgtacgatcagtaacgctcaaggcgccactgccaccatgcacatcatccgcagtgacggcaatggacgatgcggagctattccacaccgttccagacttccaaccattaagatcgtcttcgaatccgccgttgacgaccaattcgacgggttcatcggccgacgccgcagtcactccgatagtcgctggaaatacagcccccatgcaacacagcacggatgcagccgcagcagcaaccacacgaccggttttccttgtttgcaatatgtgaatgttataaaccattcagttccctttcctgaatgatggagggcgactcccccccccatcattttttcttcgccgcacaatcgaatcccacgttggttacgaccacatcgcggctcattgcaaagccatgccagaggaacgtccctcaagggcagccatgcaacagccattatataaatgagcgcatttcactcgcgatcgtccttgataacaaattgataacgatatgcacaatgaaaataagttcacataaacgcaacgcaacacatcaaatatgacagtttcatatgccaattacacactttgcataacatatttcaacaaagaatggagacgtacaagcgaactcatctgatgccaccactcatcgcctataaagctggcgtgtcgcgccacaataacatcacagccgataaaacgacaccccgaagttgagactcattcaacaatgcggccagcttagacacacaaccaacgcttcgcttcatagcaccgaacattgattccagcacagtcacgaccatcttctttgaaggcaatcgtgtttacgccccgggttctaaatagaagtgcaacaccttgtctaaggttggaagtgttcgaagtttctaacttaagaaggtgttgcactcatgggtcaacagtattcgcacctgtcgtccgaggagaggatcctgatcgagaagctgcattgcgaacagcatctgagcattcggcgaaccgcggagaggatcggccgggacaagtccacggtgagccgcgagctgaggcgcggtgtttgtgttcaattagttgttgcgggtttagtcacgatgatttttcgggtttaggcagagcatgccgaccacggaatggtcttaactggatggtgcttgtatctccgccagaaaggaccggaaaggattatgatcagcatgccccaagtacagtctatccgtcgtttgcggcggaacggggaatccgtcgcgtcgatcgcgcggaaaacacatgtcagcgagccgacggtgcgtaagtacctcgcgaaggaggatctgtcggccgtgccgtcggtgagaaagccgcgcgcgtcggtgatcgacccgtatctgcccgtgatcgagcagtggctcgcggaggatcgcgcgaactggcgcaagcagcggcataccgcgaccaggatctgggagcggttgagggacgagcatggcgcggaggtctccctgtccacggtgacgcgggcggtggcgcggctcaggcgtgagttcgcggcggagcgtgatgaggcgttcatggatctggtatggcatccaggcgaggcgcaggccgatttcggcgaggtcgacgtgctgttgcgcggcgtggtgcagcggatgcatcatttcgtgcttgatttcccgtattcgaacgtcggtctggtgcagttgatgccgggcgagaacgctgagtgcacgtgcctggcgttgcgcaacctgttcgagtggctgggcggtgtgccggagcggatcgtgttcgataacgccgccggcgtgggccataaggggtacggggagcgcgagccgcgcctgacgcacctgttccaggccttccaggcgcattacgggttcgattgttcgttctgcaacccgtattccggtcatgaggagggcgcggtggagtccaaggtcggcatggtgcggcgcaagctgttcgtgccccggccgagcgtatggagcctggagaactttaacgccgggctgccggaccggtgcctggagctggccacgaaaccgcattaccgcaaggacacggaggaacgtggcctgttctccgaggaccgtgcggcgctgctgccgttgcccgggaagcgtttcgacgtggtcacgtggcggcatatgaaggccgaccggtacggcgtggtcacgctcgagggacggcatcgttattccgcggaccgggcgaacgcgggcagaggggtgatcgtgtgtgttttgtcaagttggagtaggccgtttcggcgtttcttttagtccatgtgagcggcgggtttcaggccgtttcggcgttggccggtcctgctggttgttggttattgcattggttattgcatgagggcgtgggtcttgcgcaggattcgccctcgaagcggatcatccgtccgtggtggacggtgcggtcgatgatcgcggcggccatgttggggtcgccgaagatcctgccccatccgctgaactcgatgttggtggtgtagatgatgctctgggtctcgtacgcgttggtgacgacctggaacaggagcctgctgccgtcctcgtcgatgggcacgtagccgagttcgtcgatgacgagcagcggggtcctgccgatcgcggcgagttcccggtcgagccggttgtccgattgggccctgaggagccgcatgaccaggcctgcggcggtgaagtagcgtgcgggtatgcccttgcggcatgcgttcctgccgagcgcgatggcgaggtgggtcttgccggtgccgggagggccgaacaggacgaggtcgtcgtggccggcgatgaagtcgagggtcgtgatctgcccgcgcccgtagtcgacggggaagcggatcggggtccagtcgtagccgccgagctccttgtcggcggggaatccggcggccttgagcaggcgtgagcgtttggagcgttccctggattcgatctcggcgttcatccacgattccatgaattccatctggctgggggtcgcgtccgcgagctggtcggcgaggacctggcgggtcagaggcagccgtctggccagggtcatgatcgttgcgattctttcgccggtggacgcgcgcctgcgtttcatgtcgggcatgacgaccggcggacggtgggttcccatggtcaggcctccttcctttcccatggctgtcggggtttcatgaacacgtcgtatccggtcaggtcgggtaccgactgctcgtacggcttctcgccggcggcgatgcgccgggccatggtggtcacactggcctcgtcgatcgcgtgcccctgttcgaccaggtgctctccggcccggacggcggcctcgaagccggacgcggcgctggccttggcgatgacgcggaacgtggtcctgcgtgtcttggcgtccatgcggtcgatggcgatcctgagtttgtcggggaaatcgtcacggatggtggaatcggtccatgcgtgggtcttgcggctcaacgcgggcaggagcgtggcggggttgcgcaccgtggccggcgaatccccgtacacgcgcggcagtctggcacaggtgcgtccgtcctgggtgcggatcgtcacgtcgaacgcgcgcagacccacgtcgagagtccagccgcgccacgaggggccggcgaggtagtagttgccgtcgatctgcacacgcccgtccttgtcggccttcctcacctcccaacggatcgcgtcgtacggcttggcgggaagcggctgcatatccatcttctcaccggcgaacaggccgccgatcggcgcgcccttgcggtaatgcgtctccttggccatcgcgtcgcaacgctccagcatgtaccgggtcagttggccgtgggactctgcgttgagcatgggcaccatgatgttgcggcgcaggaacccgaccgcgttctccacgctgcccttttcgttgcccgagttcgggttgcagaacctggtctccagccggtaatgctccacgaacagttcgaacacgtgcacgacggtgaccttgtcccacgcgatccgatggccggcgccggtggcgttgtcaagcaccagcgtcagggggaccgcgcctatgtgctcgaacaccgtgcgcagccccgcgcacacgcattcggcgttctccccgggcagggccacgcagtagcgcatgttcgaatacgggaacgtgacgaccaggcaatgcacgtcgacccggtccccgccgaccacggcctgcgccatgccgaaatcgacctgcgcctcgcccggatgccacttgagctccagatacccgtccgacgggaggcgatgctcctcgcgccaccgtttcacgtaccgctgcaccggcgaatacgagccctcgtagcccttctccgacacgagtctgtcgtacacgcgcttggcggtgtgccgctgcttgcggggcatgaaccggtccgcctgcagccacccgtccaccgtcgccctgaacggatcgagcttcgacggccgcgatacggagcgctccggtccgggagagcaatcctccctcccggcgtacttcgcgaccgtgtcgcgggccacgcccacctctttcgcgatgctcctccatgacatgccatgcgcgtcaagcaccctgatacgttgttgtacggacaccggtaccgtcattcctttcctttcccgagaaaaccgaacggtttgactttcaactcgggaaactagtccaggcaggacgggccggtgttcgtttctcaccacacgctgaagtggaccagaacctgccgctcacatggaagacatccacacgctcacacggcccactttctattgaacagacacaatcgtgggcctccgcgcgctcgaggtcgaggtcctcgactcgtcgggcaagcatctggcgacccatcctcgggcgtacggccaggccagcacgaacagcgaggacccgtccatgcagttggcgctgctgtgcaacaagcccgcgtcctggcccaacagccgggtacgtgacgcgttgccggacccgttgcgggaatggctggatcggcaggacagacagacacgcaacgaggcgctgcagaccctcaaacgcgttgacagggaatccgggtgggcgaacgcggtcgaggcgatgctttccatcctcgaatcgaccggcggggcggaccgcgccggtgtcacactgctcgcggccaggctcgccgagggcgtggcgggtatcgaatacgacgatgacaggccggatctgagtgaatacgacatcgcgttcaccgcggacgtcggcgtgcaggaaggcgggcgatgaacacgaagacggacgaagggctctacgagaaggcccgcaagctgttcatctccaaggcgagcatcgacgaattcgccggctgggccacgccccgccaggtcgacgccgtccaccgcctgctcgacacggaactggcgaacagggaacgcgcgaagcacgacaggctcctgcgccgcgcccggttccccgtcgtcaagggtctcgacggctacgacttcacgaacgtcaggctccccgacggctacatgctcgatgagctcctagggctcggtttcatcccgcgcgcgcaggacctggtgttctacggcaagaccgggcgcggaaagacacatctcgcgatcgggctgggcatgaaggcgatcgacatggggctgggcgtgcggttccatcagaccgccgagctcgtcctccagctgggcaaggccaaacgcgacggcacgctcgagacgatgctccgggacatcggccgtgccgacctgatcatactggacgagttcggctacgtacccttcgacatcgacggggcgcgcctgctctaccagatcatcgcgggcagctacgaaagacggagcatcatattcaccacgaacatcgagttcagtaaatggggcacggtcttcgcggacgacaaactcgccgcagcgatcatcgaccgcatcgtgcaccacgggcggctcctcgagttcaccggccagagccgccgcgtcagtgaggccctcatgttcggcaggaacacctccgcgcaaccggaaaaataaggaaaatgcatgcaactgcctaaacccgaaaaaaatacatgactaaacacgaaacaccgacttgacgaaatacatgaggcgcggcctgtggttcgcgtccaacgagaacgggtcgtaccgcccctaccggccgaaacggctgaagaccgggccgtggacctcgggtccgttctattcggcgctggccgcgcagaggaaggcggacctgcgccggcgcggatcccgcaagccgcgccgcatggactcgggcccgttgcgcgcctgggtgctggacgcgctgcgcagggggtggagcccggaactgatcgagggacggttgaaggcccagtacgccggcgacccgtcgatgcggatcagccacgagtgcctctgccagtggatctacgccaagccgcagcgggcgctggacctgcgccagtacctggcgcgcggcaggaaacgccggacgaggaaaaagggcaggaaggcgaaagggccgcgcatcccgatgcgcgtgcccatcgcggaccggcccgaggcggtcggatccaggaaggggttcggccatttcgagtcggacacggtggtcggcgccgcgccgtcgaggcgctgcatgaacacgcaggtggagcgcaggagccgcaggctgttcgcccggctcgtcgacgacaagagcgcgtccgccacggccagggccgaatacgagatcttcaaggacatcccgccggccgcgcgcgtcgaccgcacgtgggacaacggcacggaggcgtccctgcacatgctggtggacgaggcgctgggcatgctcacgtacttcgccgacccgtacagttcctggcagcgtggcagcaacgagaacaggaacggcaggatccgccgctatctgcccaaaggaaccgggttcgaggacttggcccaggaggacctcgacgcgatcgtcggggagatcaacgacacccccatgaagctcctcggctacaaaacgcccaacgaggtatgggacgaggagatcgccaagctacaatcgaaggcagccagcccgaacacaagcgttgcgcttacaaattgaatccggggggcctcatgagccgagggtgtaagggataaggtgtaaagggtaagggtttaaaggcgtaagggtgtaaggggacactcactcctgccggtacagccgcgaatacaatccgccggcctgcagcagttcgtcatgcgtaccggattcgacgatctgcccatgatccatgacatggatgcggtcgaaatcccgaatcgatgcgagtctgtgcgccacgacgatgcacgcattgtcggagtcgagcaacgccgtcatgacatgtcgctcggtatcgttgtccagagcactggtgggttcgtccataagtaggaagtccggtcttccgacgaccggatccatcatcccctcgttgatgccggcaacctcgcacgccctgacgatgtcgtcatccgtcagccacggacggtgcagcgtgatattgtcgcgcaaggtttcgttgaacaccgtggattcctgatgcacatacgccagcctgtcggccttccatcggctgtccgcgtcgtaaatccggcatccgccgtcgttgatggtcaccgtgccacagacgggttcgatgagtccggcgagcagtttcagcagcgtgcttttgcccgagccagtggggccgacgatggcgatcttgtcgccttcaccggcgggaatcatctcgcaaatcttgcgcatataggtggcgaacgccatgatctggctgatgacgccgacgatgccggagaaggtttcgatgaaggcgcgttgcacgtcagcctgcgcgacggtcgcacgctcgaccagcgtcctgttgcgcagggaataaatgacggatacgacgagcaccgccgcgcacaccgtcagggtcagcatcgtcaatggcgctgaataggcgatcatcatgatcaggtagaccacgaggaacaccatcgacacgaccgtcgacggcagactgccggtcacgatctgttcgacgaccatgaccaggttcgcgcggtagatcaggtcaccactggaacggttcacgaagaacgggaactcccgatcgagcacgccggtcatgtatcggcgggacaggtatcgtccgaatcgcacctgcacgcgggtgagcatcatggtgttcaacgcgccgaccgccatcgccgtgaacgctgggcgcgctgccttccacgcggccacaggaggcgtcgcaggcgcggcggcgggaggacgtcgcgtttcccgattcccggacgggttcccatctccgagcgtccgccggaggccggcgaccgcagcggtttcggccattgggaggccgaaggcgtgatcggtgtcggatgtgacctgcgcaccgaggtcgagaggaggagcgggttcctcatggccaggatcgtgcccggcaagaccgccggggaaagcgtcggggtgcggctggcgatgttctcgccgctgccggccggcgcgcgcgtcagcgtcacgcacgacaacggcgccgggttcgcccgccacacgcgcctgcgcgacgggctgggcatggacacgtacttcgccgacccgtactccagccggcggcggggaagcaacgagaaccggaacggcatgatccgccggtatctgcccaaacgcagcgagatccggatgggcatggccggggaactgcgggagattgtcgacgaggccgacaaccgtcccatgcgcgtgctggactaccggacgcccgccgaggcattcgccgacgaactgctagaattgcaggaccaacagggggtgttgcacctctaaatagacatcgggcacacggtttgcgcggcggtgagcagtgagtggtgagtattgagcgacgtacggcgactcacgtgcgctcacacagtggtgagcaatccgccgaacaacaccacgagcagggcgatggtttcaatcacgaagtacagaatgaaactcgcccagcttttggtcagtacgttcagcggcgaggtcttccggataatcaccagcagaccaacaaacaccagggcgtatacggcgatgccgatcgccgcccccataatgcccagattcgcggcatttgccagaccggcctgcttgccgtagaccacgtacgtggaataccagaagttgagattgagcatgctgagtcccgcgatgaactgctcacaggccagcccgagcacgaacacgatcagccatggccaggacggcgagacgaccaccgccatcgccaatccgacgtacgtgatcaccacggccacccaaccgaccagtgcgataccttgcggagacactcccccgagcacggccacaatggagtcagtattattcaccgccagcgagcgaccgaaccagtatggcgcgatgatggcgcacagtacggcaagaataatcaacgcccaacgcaacggatgggagcgacggcgctcgatatcagccaaagacaaatcggtctcgggtatgaaagcctcggggtgcctggaaacctcgacggtctctactttgccgcctacgatttccgtcgcctcgttaggttcttgctcgttggattcctgctccatgcaccgcctcgccgattacctgcttattgccatgtattgccatgccgattattgcgatgcctatcttagcgtgcgtgttgggcaagtacctgatgttccctgtggtttcgcgcactgattggatacagacaggctactgctgttgcccgtctgtatccggcgacttgtccgccgctgtatccgtctgttcctcaggcaacgtattggcagcctgttccttacgccgcctgccgtgcagcagggcctcgagcatgtcgacctgacgctccagttcgtcgatacgacgtacctgctgcgaaatcagcaagtcgcgtaggtcattgttctgctctttgcgggagacggggaagatgatggcgcgacgttcgggcgatacgtggaaatcggattcgctgccggtaccagccggaagtgacgattccgccgagtcgcgccaagctctcgctgctcgcgcactctccggaatgtttggtgcgcccgcggctcccgagcggaaaagctccgaatctgaagcccccccccccagcttattttccacgccggctttggcattgccggagttcaggatttcgtcttgcgattcacgccagcgggcaaggcaacgttcgatgcgcttgtacccgattagagccggatccaatccggcttcacggaacatgcgcacgggtgaggcaccttcgttgtagtggactacacagtaacgcttgaaatcatcggtataggtgatgcgcttcgccgtggcttccgccactgccgacaacgacttcagatacttgatctcctcggggctaaaagtccctccaccactggtcatcctcatcccttacactcgttggaaggctcattgcacaccccccttgattatggggtgaatgccatagttcgggatagtaatacttataattcggacatgcctaacccctagtagggtcgtttttatccccgtttaagtggagcctgagtagtggctggacggcaactgaacgataatcggcccacgaatggggtatacaggcccatccttcacctcccctacgattgtgttcgcttggcgattgttaccgagcctgcgtgaaacgtttgttgtggtgaaacacaagttattttcgatgcccggccccattacattcaaatcaaaatgccatacattgcccataagattcggagatggtccacaagtcatccgtctgagatgccgccaatatgacaaatggccgatctgaataatcagatcggccattgttatagctgctcagttataagcagcagtcaagctcacgcgttgagagcgcgcttggtggaacgggacttgacgaacacggtcaccgcggcacccgcgatcagcagaccgatcacggagaacagcatggttccggcggcaccggtgagcggcagctgggtgatgttcttgacgttggtgacctggaaggtgcccttgttgtccttggacaggttccaggcatccttaccagcgaaggtggcagcagcatctgcggttgcaccggtagtgatcgtgaacttgccaacgaaggtgccgttgtagccagtcgggaccttcgtctcaatcacggtgtaggtggtgttgagcttaagaccgttcagagtgtacttaccctcagcgttggattgcagtgtgtccgtggcgccttcagggtaagtgccatcagcattggcggtcggcagagaatacgcaccgttagagccattgaacttaagcggagtcttcgctttgagctcgtcagcggacagaccgctaacatcgccttcgtacacttggaactcagcaccagtcagagcagcagcgttcttgtcgactttctgccaagtcacggcaccagccttggtggtttcttccttgctgctcttcaggtcgacaacgccggcagcggcgagaacgccagtggcgttgttcacggacggcgcggcgcccgtgatagcagtgccagcgagaatcggagcattgccattccacacgagcttgtgagtgtcattatcttcgacgaccagctttccactctggtcgacaatcaagtacagaccaccctcagcgaaggtgaaggtctgggtcttgccaccgttagaagccgtcggggtaatgtccgtgacagccagatccttaagcgcgttcacaaaagcggtggtctgcgcggcggtcagggtagtgttgcccagccaggcccactcgttcagggaatcacccttggtctggtcgttgtaaccagcagcagcgaaagcagcatccactgcctcaccggagaccaaaccctccagctcaacgccagtgttgccatcagacacatacttggcgagctcaacgtacttgaacatgcgcaggttagcctgcaggtcagcggtgtcaaccggcttggtgtagaactggtttgcatccgtggcgttgactgtgatagtcgtgctggagatgttggcctcagccgcgttggcggtggtggcgccgaaggccatgccaccgagcagggtggccgcagcagcgacacccgcgaaaagcttcctcaacttcatgagaaaccctctcttccttattgtgattgattttcttgcaatcgcggaggccgcaacctcacagcggggcctccgcgatccgcaaatccttattgtttttttcggggagggaagccttcattgactcccctcagtccgccttcggcggccagctcccctcagcgagaggagccaaaaccacctcaagtttcttgaaatcagaccagctgacgcttacgccagaccgtgtagcccgcagcagccagcagggccagcaggcccaggccaccgccgaacaccatccagtcacgaccagtcgtgccaccggtcagcggcagactggagatagccacatacttgttcgtgaactgtgccgactccgtattcgttcggtcggaatcgttctcgccgtactcgtaagagacaacggcatccgtcctggagaccgtgaccttgacggtcaccttatcgttgtcatacttccaaccggcagcaggcttttcggtgtcctccgaagcctcgaacgtgtagaccaaattgtcagcaccggtcggaaccctgaacttcaggtccccattgccgaagccaaccgtcgcgctcgcgccgctagcagtcaattcgtccttggacacagtcgtagtcagtccattgttggccaagccggtaacgtcagcgcacttaccagcattcgcatccgtgctatccacacacttcaggttgaagccgaagtccgaattagcagcatgtccctgcacaaccttcgtcaccttgacatccgaagcgggcaaggtcacgtaagaaggcgtgttggttaccgtgaaggcaccggattgtgcggtcaaaccttgtagcttgaggtcagtcttatcaaccttggagtcatagccttcaaccttgacctcggaaaccgagtatgtgtgcccctcagggccggcaggcaccgtgaactcgtgagtccagttgccggcggcattcagagttgctgaaccgttggcataatcctcgccgtcctgcttgagctggacctgcacggaatcattcgcgtgattctcgttgtcgtcggaccaagtcttcgtcaccgtaatcttggagaccggaagggtgatggtcggcttctgcgggtaggcggcggtctgcggatcgctcgtcgtcgtgccgccctgcgaggaggtcaccacggtcttgtagtcgacagtggcgctggagttgtcgttcgtgtagaagttgttgtcgccggaggcattggcatcgtccttgtggttcttaacagcctcgtcgaacgcagcctgcgtcggcttgacattgaagctcaccgtgtaggtgacgccgtcctcaagcgtgtcgtcgttggacgtgaccggccaagacacggtgccatcagccgcaaccgtcgcctccggggcgtcagcccacgccgtggtctggcctttccgggtcttcgtgtacgtgaagcccgcgggctctccattctcggaggcgctgtcggagctcacgacccagctggacagcctgtcgtgaatcgtcacgtcggcatactcagccgtcttggtgatctcctgataaatggactcgaagatgttgttcagctggccggcatccgtggcggccttgtagtagctgctggtctcggcgcggtcaccgaggttggcgttccaagactttccccacaaatgctcactgctcgttgcagtggcatccgggtagttgctggagatgccgtgcatgtacttgttcaggttgctcgaggtgtcgccggggttggcaccgctgacgacgccgatcgagtagatggtcgtcccggcgtccttcaggctcttcgccttgttcaccgcggtggcggcgacggtggggtcaaacccgctgccgtggttcggctcgccgtcggtgaagaagatgacgaccttcttcgcgttggcgcgaggctgatacgttagcgccgcctgggcgcggttgaaggcgtagtcggcggaggtcgcgccggacgcgctcaggccgttaaccgtgctcgtcagtccggagacgtcgtacgtcaggttgctgacgatctgcgtgtagttgtaggaggaccagccttcgcggtaaaagtcattgccgacgctggtcttctcggtgccggcgaacttcaccagggcgatgcggttccgctggctctggtcggtaatcttcgcgttctctgcagccgtcgcattgatgaatttattgaccgcggtcttgagcgagtcaatcttcgtaggctggttccaaccgctagcgatcttttcggccatcgaaccggacacatccaacaccagcacgatgtcgagtggctggttcgtcacgatctcgcccgtacccgcgctcttcgcaccggtgacgttcaacgccaccgtgtacgtgccgtcttcattggcggtaacggtcttctcgcgggccggagcagacaacgtcggatcatccggcacgccgtttgttccctcggtggaaagaggagcaggcgcgctggcggccgccttctcatcggtggtctgcgattgtgtcgtggaggcattcccatcgtccgccatggcggtcgcgctcacaccggcgacgccaccgagcatcgccacggcggcaacgatcgccactaaccgtttgcctttcctgcccgccgcggcccctaccgctgcgaaccattctgcaattctcttcataaccttgcctgtctcttacgatcacgtacgccaaaacccggcgttacgcttataaggcgttacggtattaagcaaaaagcacgaatgcgtacacccgggtagagggaattttttacccgacattgaaaagaaccttggaatttttgaaaagtggcaccctcgtcatccaccctgcgataacgcacttttcttctcgacggggcgtgccggtcccaccatctgggaactgaggcggatttgccgccgctgcgcgggggccggagttactgacgaccgtcagtatgccactgctccgcatgtgtgcagtatcacataccgctacgcatacacggagacatactacatgcaatttctgtgaacgcaaacatacgactcaccaaggccgtgttctgttgcgggcggtggtgttacgggcaatgttgtgggtagtaccctagccacaaacctatatagtggagcggatgacgggaatcgaacccgcgtaatcagtttggaagactgaggctctaccattgagctacatccgcgttaaacgtcgcttttggcgacttgagttattatacatatttcttcggggatggcaaacgcgtgtggctgcagcaggaccagcaaatctagttgatggattgcggctttgccgaggactcccctcagtcgcctacggcgacagctcccctcaaagaggggagctggaaaccgtcgaaatcacaaatggatgagctgggactcgtatggttggaggtcggcgcccatcgcattcagaatcacgaaccagcagttttcgggcagcgagtcgagcttgtcgatctggttcttgagcaggcgcacgtcgcggctggtgagcgcgccccacaggttaaccatgatggagacgttgtacagcatgtagcactcgggggcctcgggcgctattccacagaaatcgtcaccaccgcggaggcaatcgaaccatcgtggctcagggaaatatggatatgcggcatcgaccccgcaccgatagtcgagcgctgcgccgaacgcgcattccgccgctcctgcatcactgcataaggcccgttatcggaagcagaggaataagcagaggaatagcgagcgccggcagccgaattcgcgtaatcagtttggaagactgacgccgcccccttacccagagacacatgcggcacaccacgggaatcgtccaagatctcgatttcaggccacgggaaattatcaagcgtgaacggatagggggcatcgccaagataatcgcaccaggctttgaggaacgcctccttgcccgcccatttggcggccagatggacggcctccccgtcattcttctggcgcgcgcggtcggatgcctgccgcacctcacgcacggagaacagcgcacgcatgcgagaccccggctccgccaactgttcggcgaatgcggccacatccaccacgtcatgccccaaaccacaagtattcatgcttcctattgtgtaccgcttcgcgcgtaatctctacacctcatcagaattggggcctgatttccatttcagggggaaaagattcactatgctggatgacctcgcgcaataccgcaaacatcttgggctggctgcctagccgtccaaaataacatccgcgccccgccccgaaggtctattgaaccgcaccccgattgttggactggagtaattcatgtccgatgatttggaggtgcggttttctatgtcacggaaacgcaggggttcatacgatgtcgagtatatgagaatcgtcgtcgggttgattcgcgatgggatcggcgccaagtcgctcgcccgccggcttggcgtgtccaaggaaaccacgagagaatggttgctgtcataccgaatcggcggagaggcggcgctcatgggcgaacgcgagggcaacaggaaatacgattacgagacgaagctcgccgctgtgctcgaccatctggaacgtgggatgagcaggccggaggtcatggaacgttatggcatcgccagccggacgtgtctgaaacagtggtgccaggactatcgtcgcggagggccggaggcgctgcgcccgaagcccaagggcaggccgaagggcgcgaaatccaaaccgaaaccggctcccacgcgcgaacagctcctcgaggaggagaacgcgtatctcaaggcgagggtcgcgtatctggaaaaagcccgcgccctgctggcgtcgaagccgacaaccgggagaagtcggtgatcgtctcgacgctggcggggctcggccatccgctccggtgcctgttgaaaatcgcgggattggcgagaagcacctactactatctcctttcgcatcccgagccggtcacccggccggatatcgagccgatggtcgctgaggtcttccatcgcacgcccaacgggtgcggccaccggcaggtgcgcatgtgcctcgtatacgagttcggcgtgcgcgtgagccataagagcgtgctcagggttatgcgccgcatgggattgaagtgcgccatacgccgcccgaacccataccgcagatacagctcataccaaggcgatacgggcgcgaagccgccgaacctgctggaacgagacttcgcggccgaccggccgtgggtgaagctgggcacggacgtcaccgagttcagggcagcgggcggcaaggcgtacctcgcgcccatatacgacatgggatccaaggagatcgtggcctgggacgtcagccggcaccccgacctcgcccagcagcaacggctgctcgccatgctcgaggagaagctgcccgaaggcgccgatcccatactccacagcgacatgggctggcaataccagcacgactggtggcggaacaggctcggggaactgggcatccgccagtccatgagccgcaagggcaactgcatcgacaacgccgccaccgagcaggtgttcggccacctcaaggacgagttctacaccggccgcgagttcgcctcgtacgaggagttcaagagcgaactggacgcgtacatcatccactggaacaccagacgacgccagatacgactggagggacacaccccggaggaattccggaacatgtccctcacagcctaatcaggtacccttaataaaccacgtccaacttccggggcgcagttcactatctccgtttcgaggggcggattttgaccgttccggaggtctacttccgtttcaaggggctggtcatcctccataccacgagtatccgcagcataacgccaacgccattccgccgtttttacgccttgtctacttgggtaacagccccttgaaacggaagtagacctccggcgaatgccaaatcagccccttgaaacgcagaaagcccactccgagggaggggctttcgtatgttctgcatatttctctcactgagtttgtgccagcgagaaagctccaggggaaactcccctcacccgcttcgcgggagctcccctcaaagaggggagccgagatccggtgcgctactggctcccatcaaccggggggagccagagaatatcaggcctcgtagtagccgtcggcaccgaggcgggcgtccgggttgaggagcatcgccttttcgacctcgtggtggtcgtagccacggtgatcctcgcggaagcgacggttgtcgatcggctcgtagagcgcggcgcgacccatcatgccttcctcaaggtgacgctggccggcggccaggcgggcgttggcacgctcacgccaagcttccagtgcggcctcaccatcggccttggccacggccgcctcgaaggcaccggggtgaaccagggccacgaagccggaaacatgtccgaagccgagcgaggtggccagaccggccttgaccgggcgaccagcggtctcgcgaccgaactcgtcctcgccaccgccgatgcgcaggggcttcctaacccagaccatgtggtcgtcgcgctggagcttcggatccacgcagtcgagcgccgcgttcgccggaatcacgccggacttgaacagctgcgtcagaccgttgacctggaagatgcaggcaccacccttggcgtggccggtaagcgtcttctgcgagatcacgaacagcgggttgccgtcggtgcggccgatggcgtgggccagcgtgttgtgcagctcggattcgttcgggtcgttggcgttggtggacgtgtcgtgcttggagaccacggcgatgtcgtcggctgagacgccgagcttagccaggtcgtgcacgagcttggagtccttgccgccgaggccggcagccagggcaccaaggcccggagccgggatcgaggtgtgagcgccatccgcgtaggagtggatgaagccgaccacggccgccaccggcaggccgagcttttcggcgatgtcaccgcgggtcacgaggatcgtgccgccgccctgggattccaggaagccgccacggcgacgatcgttcgcgcggctgaagaagcgcgcgtcgatgcccttgccgtacatttcctccgagttggcggtggcgttcatgttgccgaaaccgatcacggattccacgccgatgtcgtcgatcgcaccggtgaccacgaagtcggccttgccgagggcgatcttgtcgacgccctcttcaagggagacggctgcggtggcgcaggcggagaccggctgaatcatgttgccgtagccgccgatgtaggactgcatcacgtgagccgcgaccacgttcggcagggcttcctgcaggatgtcggtcgggatctcgtggttgaggaagcggtcgaggtacagcttgcgcatcgacatcatgccaccgaagccggtgccctgggtcgaagccaccagcgaggggtggatggactcgaggatttcggccggggtgaagccggcgcccaggtaggcgtccacagtggtgacgatgttccacagggcgatcttgtcgacgtcgccgaccatcgaggcgggaatgccccatcgggtcgggtcgaagcccttcgggaactggccgccgactgtgcgggtcatggtggcgcggcgcggcacgcggatcatcgagccggcgtggcgggtcacgttccattcgccggattcctcatccggggcgatggtggtgtgagcctcgtccaacttgacgtattcggcggcgacttcgcgggtgggcacagagaaggtgacgtcgtggtcgaggaagacctcggcttcctcttcgtcagcaccgtccttgtagtcgttgcccatgccttcctcgaacgggcggatgccggagcgggccacgacctcgtcgtggtagcgctcggcgatgtcctcttcgggcacgaggttgccgtcggtgtcgtaccagccgggcttcgggctgtcggcccaagtcagcagacccatgttccacgcaagttcgagcactgctccggcgctcaggtcgacggtgccgtccgagtggatgccgagctcggcctgggcgcgcgtacgaccggagccccacgggcccagctcaccgacggaaacgatgacgatttcgtcttccggcttggcggtgacgttggtccagtcgttgaggtcgaccgaagcctgcttggtgacgatcggggtgggcagcgccttgatttgctgcccacgcgaggagtcggacagtccagtggactttccggcgacggagccatccgtttcctgagacgaggccgcagcagcttccttctcggcgtcggccatggcctccgcacgcagggccttgatgtcgatgggctcggagccgaggccaccggtcaggtccacatcgagcggggccttgagggcctgctcgcgcgattcggcagtgcacaggtcgagcagcttggccgcaatctgtgcggtggagtaggtgcggatgccgtgacgctcaacgacggcgaccagcgggtcgttaccgcccatcaggccggtgccacgcacccagccgatcttcgggtgagcgaaggtgacgcggctcgaccacaccttttcagcgcgggcacggttgacgatggcgtcaaaggcgctcttgacttcgccgtaggcaccgtcgccgccgaatacgccgcggttcggggaaccgggcagcaccacgtggagcttgtgctgcacgttggtgtcggcaccgatgtggctgaagccggcgatggcgcgttccacgccccacagcatcagtcgggcctgcgattcgaacaggtcgccggagtcggcgagcgtgccatggaccggcggagcggcgaacgggaagaacagggtcggctcccacgcgggcttcagaatcgtggtggtagcaccggaggtcttcttctgctcgtggcccacccagtcgaccagtgcgtcgacgtcgcggtagctggagaggttggccggaaccagccacagcttggcgttgccggtagcgtgctcgcggtaggcctgcttagcccaagccttaatggacggcttgaagctgtgcgaggtggccaccacagtggcaccgcctgcgagcaggccttcgaccacctgagcggcaatcgagttcgggctcacgccggtgacgatggcgatatcattcgcgtaacgggaggcgttcttgttggacgcaacctgttcgagggcctcggagccggccttctggaaggcggccttgagttcttcgctctccgactcgttggcgaaccactgggcttcggcggcgatggtcttgccaaggccgatgaagctgccgttcaaggcggcgggatcgttgtcgtagtaggcgcgggcgaggtcttcacgagcggaggcccaccgatcatcgaagaggatggccttgttggcgtcgaagcgcggagcgacctgcttgggccagtcggagccaagttcggcttcaaccgcggccacgacggcggcgttctcgtcctcggattcttccggagccggagcggccacgccgagctcgttcagcacgaagcgggcggtggcggcgagcacgccgttggaaccggtgaccttctcggcgaaggcgtcgagcgcggcggaatcgaccacagcgccaccagcggcaccaccggcggacggcagggccacggcaacacccttgagctgggcgacgacctcaacggccgcatcaatcagcttgtcggcttccggcttgttctgcacggcggcggtgggcagcttggccaggtcgccgccacgggagctggcaccctcgcgagtgtcgagcagcagtgtggcgagcacgctggccacccaaccttcaccgagctgccatacgttggtcacgcggtcgcggatgtactgctgcttgacgccggcggcaccgaacagcgagcgcaggcggtcgcgcagcgcctcggatagcacggcaccgaacggcttgtagttcggggcggccttgttgacgatttgggcgagcttgtcgagcgtcgcttcagcagcaccgtccacgctggcgactcccagctcggaactgatgtccatgagcagctggttgcggcgagaagagacaccgttagtcagggtgtcggtggtgtcgttgctgccgatctggtcgatgcgcaccttggcggagtaggccatgagcacgccgatggcatcggaagccttgaagggcaggtcggcgacggcggcaccggacggcgcgccggccgcggcctgccctgattgcaggccgcgcgaggagtcggacagtccagtggactgtccggcgacggagccatccgttgtctgagcagcctcagtcacggcatttgccggagcggcaccggaaccgagctcggcaacggcggaaccaccggcaggagcggtttcgaccggggccgaggccgcagcctcttccggctcatcgtcgggaaccagcgaatcggtgtcggtcatgtagacgcggccttcatcgcggccgacgttgtagacgaccgtatcgttgccggcgaactcgggcagatgcagggtcttggcaccgaggttggccagggtcggggcgttgccgaggccgacttcgacgtattcttccacgccgaggccgccctgttcgcgctgaccgaagagcagcgcctgggtttcaatccaacgcaccggggaggcgaactgccaggagagcagttcggtcaagagcagacggccgagcttctggtcgtcatcggcgtaggaatcccacacggccgggtcgtcgagcgcggccttgatacgctcggacggcacgacttcgaggatcttggcggcgaattccttggtcatctcgaacggggtggccaccaggttcgggatgtagcggtccaccagacggccacggtagtcgatgtaagcgggaagcagcgcgtcgagcttgtcgcggaattccggcacgcccttgcgcagcagtgtggagtggaacggcacatcgatgccgggcaccagcatgaacgcgggcttgccaccgaatgcggccacgcggcgggcggaatcggccttcagagccttgagtccggcgatcgtaccggcgatggcgtactgctggccggcgaggttgtagttcacgatctccaggaattcgccggacgccttggccacggattccacgtattccttgacgtgcgcgtcgtccacaccgaactggttcgggcgcagggcacccatgcggtagttggagcgaccctgtgcgtcacgctcgatgaggtggtgcatggtggaaccacggtggaacacgagctccagcacggtttccagcggaatcacgtcggcgaacgcggacagcgcgttgtattcgccgagcgagtggccggcgaagtaggcgggccagatgtcggcgccggcttcgcgcagacgagcggtctgggcgaaggccacggtggcgagcgccacctgcgtgaactgcgtcaggttgagcaggccttcggggtgacggtaggtcacgccgttggcggtgagctccttcgggttatcgcgcacgaggcccaggatcgagaagccgagcttggagcgggtgagcttgtcggcgcgctcccacacgtcgcgggcggcggcggacttggcacgctcgtccagaaccatgccctgcttctggatgccctggccggggtagacgaaggcggcgcgcggcgcgcggaccagtgcggtgccgcgggagacgagctggccgtcgatacggcaggtgacttcgagggtcatgccgccgtggcgcaccttgccgacgcgctcgacggagatttcgacggtgtcgtcaagctgaaccatgccgtacatgttgtaggtccagccggcaatctcgtagtgggcacccttctcgtccagcgcctgcacggcgtgctgggcggtggcggacagccacatgccgtgcacaagcggagcggccaaaccggagatgcgagcgccacgagtggaggtgtggatcgggttgaagtcgccggaagtgcgggcgaaggcggtcatgtcgtgtggggcgacgaccttcacgcggcgcagcagacggcgcggcgtgggcgcgatctcctcgtgctcggcgtcgccgaactcgggggcgtctgccggcaaagcatcggagtagacgcggccgcgaatcgcgaaacgctcggtttcgcgggcaagcagcgtgccgtcggcagcggtgtgggtcacgtggatggtgaccacgcggccggaggcggactcgaagtaatcctcagcccaagacttcagggtgatggtttcaccggtgtgcttaagcaggtcctcctcgttcacctcaagttcgatgaggtggtcgaggtgaacggcgttgagcaggccttcaatcaccgggtagcccttgacgtacacggagccgagcgccgtgtaaatcgccggccaggccgggccgaccagcgcatcgggagcgatgcggctgggctgcagggtcgtcggcagagcggcgccggtggccgcttcgtggtcgaagccgaggttggcggagagggtgtaggcggcggtggcggtagcaaacggacgctcgtcagaggtcttgccgtcaagctgcggcatctcggtgagcttgtcgccggtgatggcggtgttgccgatgcctgcggtggcggcgagcatcgcgtagacgtccggaatcaggcgttcgcggtccacgaccggcacacggccgggctcggcgccttccacgatgagcgggatgacgatatcgcgcacggcgtgcttggaggtgccgccgtccgggtcgttgtcccagtaggtgtcgaggtggatgtccagatcgtacttgccggccgcggcgtcaaacgcgcggatctcgtagtactggtcgcccagggcggtgccgtaggccgggttgtcggtgatgtggccgacccaggagatgttcggggacttgcggatgaagtcttcggcgctggtggcctcgccaagtgcggcgaaatcgtcgttctcagcggcatcggcggcctgctgttcgtcctgcacgcgcttgatggcggcggtttcgaagcggccgaggatgtcggcgatcggctcgtcgatggtggtgatgccggcaacggagatcgggccggggatggcacgcacggaatcggcggagtagcgctggtcttcggactgccagagctggtcctgcccccaccaacgcagcaggtcgttgtcgatgacgggcacgaacggcatgggcttggggtattcgcgcacgagcaccgggaaccaagccacgtcggtcgggaccaccttgagttcggcggtctgcgggtaggccagtgcgagcttttcgagcgcgggggccgggtcggcgagaatgtcgtcgtgggtcagcaggccagcggcagctgcctcttcagcagaaacgccatcagcggcgaacaacttggaggtgaattcgccggagtccgtgtcgttcacacgggcttcgatgcgctgcagcaggtgctggaagcggtcggcgtaagtcgggtcgacccacgggaaggcgagttcggcgaagcgctgcgcccactcaaggtaggtcatggaggccaggtcgccgaagtaaggcttggcggtcttgttcagggcttcgatgatttccttgcggcgggagtcgagctcttcggggtgcttcatgacgcgcacgagcagacggccgcattcggcggagtcgttctcgagctcgtaaatgtcggcgtgcaggtggctcaggccggaggacatgccaccgacggacttgccggacggcacccagtgggcggcctgcggggcgaacacgtcgtcggacttggcgtcggccggaataccgggcgtcttgacgagcagctgcttgacttcggggctggtgtgagcctccttggcggtcatcgcggcggtaccgataagcacgccgtcgaccggcatgtcgggcaggccgtaggcgtgggcccactggccggaaatgtagtcggccgcgcgttcgggggtgccgatgccgccgccggcgaccagcacgaggttgtcgcaggcgcgcacttcggcgtaggtggcggcaagcaggtcatccagcgcttcccagctgtggtggccgccggcttcaccgccctcgacctgaaccatgatggtggtgggggccacggccttggcgatgcgcacgacctggcgaatctggtccacggtgccgggcttgaagctcacgtacggcaggccgtccgcctgcaacgactcgatcagggccacggcttcgtccagctcggggatgccggcggagacgaccacgccgtcgatcggcgcgccggaagcacgcttcttgggcacgatgcgggaggagccgaactgcaggttccacaggtaacggtccatgaacatcgcgttgaattcgaccgtgcggccttcctccagctcgtcttcgagggcggcgatgtggcggtcgaacacttcggcggtcacctggccgccgccggcgagctcggcccagtagccggcgttggccgcggcggccacgatttccggttccacggtggtgggggtcatgccgggcagcagtaccggcggcttgccggtgagcttggagaacttggtgaccagcttggcgccggccggggtgttgatgacgcgcggggcgaacgccttccagttctgggtgcgctcaggctcgctttccagcgtggagagcgtggagcgctcggccagcgtagtggcttcgaccacgccgatgccggtgccctgcaccacgttgccgatcagcttgccgagcgtgttgccggggccgaggtccacgatccacagcttggacgggtcggcgtcgtcgaacagcgccttgacgcgggcgttccagtccacgtggttcaggagcacttcctcggcgagtgcacgggtgcgcttctggtcgaagccgcaggcgccggcccaggccacggtctgttcgacggcgtcggccatgagcggcgagtggaagggcagggtgacctcaaggtattcgagggtcgggttgaacacggtgccgccgtggagcttctgctcgcgcagcttggcctgatgctggtgttcgcgctcggcttcgagggcgaaagcggccaggtcttccgggtagccggacagcacgtggtggttgtcggagttggtgacggcgatggagatcgggccgcgagcgttgttgacgcgggccaccagcgcctcgacctgggcgcgggtggtgcccttgacggagagcatcgggctggcttcgccgtacttggggttcaggcccagttcgcgcacgcggcgggttccggcggcgccgatcagggcggccacggccagaatctcgtcaagcgtggtgccggcggcctcgatggagccggcggcctcgatggcgcgggtcatgtgcacggcgagcacgccctgggagtggccgagcactgcgagcggcttggcctgggccacgctgtagccgaggtgttcgaggtcgagcagggcgccgagctgggtcagtgccacgccttccacggacgcggtggcgtcggctgcggcgccgaggcgtgccgggttcggggcgaagccgaacaggtcgaccggacggccggtggtggccagcaggtcggcggcgaccggggtgagcagtcggccggctgcggcgacgtggccgcgcagggcctcgtcaaggctgggatcggtggtctggtctgccagggctaccggccacggggtggactggccggcgaaggcgagcgcatggggctcggcggctaggcgattgaggaagaaggtggtcattgctttccttacttgtgtttggttgacgtcttcaaaaatcagaggggctggttgccgtggtgtttggtggtgcgcttgacgcgccgcttggtggcgagcgtggccagcgattcgacaatcacctcacgggtctgttcggggtcgatcatgccgtcgatctgcccgatttccagtgacaggttcgcgttgacggtgctggtctcgtactccttgatgtacttggcccgcagcgcatcgacgtcctgtccggaggccttggccttggccaggtcgtggcggtggatgatgttcaccgcgccggccgcgccgagcaccgcgatctgggaggagggccacgcgaagttcaggtccgcgccgatggccttggatcccatcacgatgtacgcgccgccgaacgccttgcgcaacaccacggtcaccatcggtacctgtgcgttggcgtaggcgtagatcaccttggcgccgcggcggatgatgccggcgtgttcctggtcggagccgggcttgtagccgggcacatccacgagggtgaccacgggcaggttgaacgcgtcgcacaggcgtacgaatcgggcgactttctcggacgagtcgacgtccaggatgccggcgagcacgttcggctggttcgccacgatgccaaccggcttgccgtcgatgcaggcgaagccgacgagcgcggaggcgccgaacagttcctgcacctgcacgaattcgccgtaatcgacgatgcaacgaatcacttcgagcatgtcgtaaggctgacgttcgttggtgggcacgatggtggcaagtcgcttggcggtctcgcgttcggcgcgggtgacggcgtatgcgtagaccggcggcttgctttcgctgttggacggcaggtaggcgagcacggtgcgcgcatagtcgatggcgtcggattcgtcctcgccgaggtagtgggccacgccggacacccggttgtgcacttcgccgccgccgaggtcggccatggagatggtctcgccggtcgaggccttgaccacgtccggtccggtgacgaacatgttcgagttctcacgggtcatgatgatgaggtccgtcagggccgggcagtagacggcaccgccggcgcaggggccgagaatcaggctcagttggggcacgaagccgctggcctcgcaagtcttgcggaagatgcgaccgtactgggtcagggcggccacgccctcctggatgcgggcgccgccggagtccacgatggccacgatcggcactttgaggtcgatggccatgtccatcagtcggcagatcttctcgccttcggcggtgccgagggtgccgcccttgacggagaagtcctgggcgtagacggccactttgcggccgtagacctggccgaagccggtgatgacggccgcaccggcgttgccgccggcgatattgccgccctggaagcggccgatctcctcgaacgtgccggtgtcgaagagcaggtcgaggcgttcgcgcgcggttttcttgcctttggcgtgctgcttgtcgcgggcgcgctcttcggcggcgcgggccagttcggcggccttgaccacagcggtgcgcagcggctggtgggccgaaggctgtgcggcgttggcggccgaggccgcagccgcggccttcacggcctgcgaatccatgatgtcagtcattgccaccctccttcttggcgtcggtggccttatcggctccttctgacgagggagctgtcgacgcagccgcctgagggagagatcccggcgcagccgcagcagccttggccttgccggcgttcacgtccagcgtgaccagcgtgtcgccggcctccacgccgtcggccgggccaacgaaaatcttcttcacttcgccggcggccggcgcgtacacgtagttctccatcttcatggattcgagcaccaccagaaggtcgcccttggccacttgctggccttcggacacgttgatgcgcgtgaccacggcctgcatcggggaggcgatgacgccggatttggcgccgtcgttggccgcagcggcactggaggccacgttgtgcagtcccgcaccgcgcaacggctgggtgggtcgcttggcaccgcgggcgcgggccgagccggtgatgttctccacgatgtcgagtggcacggtgagcttgacgcggcggttgttcatctcgatgacgaacgtctccgacttggacttgtcgggcgcggccggggcagcggcacccggggcggcggccaaggaggccggctggccggaggcggcggaagccggtgtgcggttcaggtacgtgcgctccagccacttggtggacacagcgaacgggtggccatgctcggcggtgaagtcgtcgttgcggaagatttccttgaacagcggaatcggcgtgggcacgccttcgatcacaagctcatcgagcacgcggcgcacacgggccacggcgtcgagacggttctgggcggtgacgatgaccttgcccatcatcgaatcgaacttcggggagatggtgtcgccctgttccacaccggtatcgatgcgcacgccggggccggccggccactggatcttctccaaggtaccggagccgggggtcaggttggtggccgggtcttcgctggtgatgcgcagttcgaagctgtggccgcgcagttcgggggcgcgggtgagctcgccaccggcggcgatattgagctgttcgcgcaccaagtcgatgccgctgacctcttcggagacggtgtgctccacctgcaagcgcgggttgacttccaggaagtacaccttgccgttcggggtcaccatgaattcgcaggtgcccaggcccacgtagccgaccgtggtgaacaggcggcgggagtattcctcgagcgtgctgatgatttcctcggacaggaagggcgcgggtgcctcttccacgagtttctggttgcggcgctgcagcgagcagtcacgggtggagtacacggtgaagttgccgtgcgagtcgcgcccggactgggtctcgacgtggcgtgccttgtccacgaacttctcgatgaagtattccttcaaatcgccgccttgcagcgcgtcgtggttcatgtagaagcggcgcagctcctcgtcgtcatgcaccacggtgatgccgtggccgccaccgccatcagtgcgcttcatcatgatcgggtagccgtgggtgtgtgcgaagtcgagcagcgtgcgcacgtcggtcaccggttcggacaggccgggcactggcggcactttggcgcgtagggccacgcggcgggcggtaatcttgtcgcccaaatccaccagcgcggtgtggtgcgggcccacccagatggcaccggcatcctcgaccttctgcgcgaagctcggcacttcggaaaggaatccgtagccggggtgcacggcatccgcaccggtcttgtgcaggatgtcaatcagcagatcttcgttgaggtacgtgtccttgtaggtgtcgccggagagcaggtatgcctcgtcggccatgtccacatagcggctattgcggtcctgttcggagtagacggccacggtggagatacccatctccttggccgtgcgcaccacgcgaagcgcaatctcgcctcggttcgcaatcagcagttttttgacgatagaagccatagtgtcaaattgtgctctctatatagaggagagggcaagccgcgttcacacaaaagctttcacgcccttttgtaggctacgaacaaacgcgcgcgtaggttccggcaacgtaaccgttggcgccggctatcaaaaacgttgcaaatccgccgattgcacatccttgcgcgccggctcaagaagttgacgttacggttgtgttcgtcaacttatgacaaatcgaaatcgacaattttgtaaattggtacgaaaccgcacgaaatcgaacacctctacgatggcaaccgtaagttcgggggaaggctcatctgcgggcgaacggaaggtgaccggaccggcatcggtccatcgccgcacgattcgcccgcacagggtcggattcatttgggaccgtccaccatatggacggttcggactgtcggggataccgcacgacccgccggaacctcccctcatccatcgcataccgcccgccgttcacggcgatatcacgcaacataggggtcattgatatgcagacttcacacaccaccgcatccgctgcggccaccacatcgctcgcccgtcgtatcgtcgccgcatcctggaagccggtgctgttcgccgtgctgatgtggctgtccgcggccgccggcgagattccgattccgggcacgccggtgccgatcacgctgcaaacgttcgtggtgatgctcgccggtcttatgctgccgtggcgtcaggccggtgccgccgtcgccacctatctggcggccggtgcggtcggcctgccggtgtttgccggcggcacctccacgctggccctggtcggcccgagcgccggcttcctcttcggcttcctgccgggtgtggtggtcatcgccctgctgcgcggcaagtccgacacttcgtccttcgcggccgccgcgcgcaccgcgggccgctacctgctggccgcgctggtcggcggcgtcgtggtggtgtacgccttcggcttcgtcatccagtccgcgctgaccggtgcgccgctcgccgccgtggccctggtctccatgggcttcgtggttggcgacgccatcaaggccgtggtggcctctctggccgccgccggcctgtccaagctcggtcgctgacctgagctactagctagctactggccggctattacagcactcccacatcggcggtgcggaccgtatggtccgtgccgtcttgtgttctcaggatcagtgaggcgtcttcgttgaggccgatggcttcgccggtcagcgtggtgccgtccgtgaagtgcgcctcgacctgacggccgcgcgcccagcacaccgccttcacctcctcgcgcaacgactcggcctggcccttcgggtcggcgatgaacttcaccaaccgctcgcggaagccctcgacctgacgttcggccaccgcatcgcgcatctcgccgaacgacggcagcccggagacatgcagctgcagcgaggtcgattgcggcgtgggcagccgacaggcgcccaaggccaggttcaggccgacgccgaacacgatgacgacgtcgtcatcggcatcagcatcagtaccggtaccggacgacggcggaatcaccagttccgagagcagcccgcccagcttgagcccgtggcagaacacgtcgttcggccatttgagttccagcgagcagtccggctggttcggcgcggcaccgtattcctcgatcatgccgttcagggcgtccagcgtgaccagtccggcgatcatctgcagccagccattgacggattcgtcggtggcgatcgcgcgcggaatgcgcacggcataggacatcgtcgagcaacggccgggctgactgacccacttgtgaccattgcgcccacggccggcggtctgccggtcggcggccaccacggccaccgccagttcgccatcctggtggtcgggcaacgtcaacgacccgtcgccaatcatctgtacggccagcgcgttggtcgaatcggtttcgtccacggcgaccacatgatctgcgacggctgtagttctgggtagctgcggcgttgcagctttcaacgcaatcatcatgggcactacgttacctcgattttgacgcgatatgcccgcgttattccatggaaaagcacgcaaaatcaactattttcacccacatagcccatgttaacgttcacaacttcggaaattccgcattcgccgaccccacgcatgcacccggccgtcatattggcttgcgaacaatggcgatgcccggcagacatcgaatatcaaccgttgacctgtgcggctaccatatattgtcatgacgtcaccagccaccgcgaagcttgccgccgtatccagccgccagtcccacccgcatcttgcgcgcgcgggcgctgccgcgcgctggacactggccgtgctggccggcctgtggcttgcactgtgcacggcggtcggcccgctgtactgggacgaggagaacggcaccctcgcccattggaactgggccaataccgcaatattcgtcgtgtcattcctgatatatctcggaatcatcacgctgatggtgcgattcgcagcaggccagcgcatactgccgagggctatcggcgagcgactacgtcaacatcagcggaatagcgaaacatcacggcccgccgccgatcagcaggccagccaaccagccaagacccgtcgtaccgttcgcgctatcgtcacgtccaccgtcactgttctggaccgctggatcacacgcggcacgaaccggttctggaagcttatgctggtgttttttgtcggctggctctgggtgccgaccactctgctggccgcattcggtgcggacctccgctcacagatccgtgaattcagctgggcctggaaccagtggaccggcctgaaacagccctatatcggcttcttctccttcgtgccgatggacatctaccccactgcgcactacatgtggccgtccgatcccacgtatctgaccgaccagcacaatgtggtactcactgtgttctatggcgcgatggtcacgtttgcgaggcatctgaccggctcaaacgatgccggtatcgtgacgttggctgccctgcagacgctgttcgccgtgttctgctgcgctgccgccgccaatcgattcctgaaccggccttggataggaaaaacggcaacggattccgccgctcccccacaggccggaggattggctcgattcctgattctgctgttctttatggtctgcccgctggccgtgttttccactatctccatcaccaaatcgccgctgttcgcgttctcgttcgtctggtggttcagcgtctggtatgaactcgtccagacctggcaccccgtcggcacccgcaaacatcctcagacccctgccatcgccacgcccgtccacttgccgcgtcacagtttcatcgcctttatcctggccacgtcggtaatgctgatttccgcgaaatatgcgtggtacatcatcgccctacaaatcgtgctggctctgatcgccgaccgcaagcgctgggcgacttacgtcgtggcgctgctcatccccaccgtactgattcacggcggcatctccttcgccatctcctctggcgcgatcatcggcggcgacccaatcgaaagccgcggcgtacagctgcaaatgatcgcccgcgtggcccagcgcaatccggacggcatttcagacgaagccaaaaagaacctcgcgcccgtcttcaatctcgatcagatggccgacgcttactcccagcaggacgccgacccggtgaaatcctccggcattcaggccaagaaggtcagctacaagtggcgcacggtgacgcccgaggatatgaccaatttcaacaaggcatggttcgaaatcgtcaaggacaatccgatcatcgcgctggatgcgttgctggccaaatgcttcggatacttcaatgtgaacgatcagccgtacgtatcgatggattattacgtggccagcgattacgtgcagaaaaactccacatggatcaaggattacaaccatgactggcgtgagcacatcgccggcttcactcgcgtatggggcagtattcccgtgctcggctggcctacgcacggcaatttctacgtggtgatgacattgctgatcggcgcggccgaggtgattcgccgacgttggctcaccctcatgacccatattccgctgctactgctgatgggcgtgatgattaccgcgccggccaataatttcgagcggcacatgttgccggttgcgtttgtattcggattcgtggtgctgacgtattggcgagagtctttggctgaaaggcaacgccaatcagcgacgctacactagtgactatgtcagattttctcgaacttcttgctgccgacgttgccgattcgtccgcacccggcatcgccgcgaccaaccgcgtacgcaccgtgctgttcgagtgcctgttcaatcatctggccgacgaacgagtggagtccctgttcaccatcctcggcttcgagcatgacttcgattgttacgccatcgccggataccctgcccggtccgccgcacgtacggccaaggaaatcgagaaaatcgtagccgatttcggcggtgtgtgtctgaccgccaagcgcccgatcggcaacagcaccgccgtagtggcgttgattcgtccggtcggtgcggccacgccggaaatcatctgcaataccatcgccccgtcgttcgccgccgatcggccaatcgccttgggtccacagcgcaccggtgccgatggcgcgatgcgttcgattcaggccacgctctactgtcttcaggccgcgccggccctggccgccaccgtgcagccattgccgcgcccgttacgcaccgacgacgccctgcccgaacgtgcgttgatcggcgacgcggacgcccgtgacgaactggtccgcgtggtctacggaagcctgacagcagcaggccctgatgatccgacgctgctcaccgtctccacattcctgaagttcggcggttcgctcgagaccacggccaaggagctcaacgtacatcccaatacgatccgctaccgtttgaagcgtgccgccgaatccaccggctgggatgccaccgacccgcgcgaggcgtacgtgctgatcaccgccatcgcgttgggtcgtgtggccgaagcgtaacggaccgcagcgtagtcgggcagaagcataaccagcagaaccgtagccggcaaaggccatagctgaccggacataaccgtccagcccgacagcctagcgggccgaatcaggctgcctgaatctcgtgtacgccatcgtgcagtaacgcggccaagaattcttgagtggctaacacttcgtccacgaatccaccggcggacaggctggcgatcacgcgaccggactcgttgtccacaatcggtacaccaacggcaccgacacccaacgtcacatcctcatccgacagtgcatatccacgttcgcgagtcaagcgaatatcctcgcgcaactgttccacactgaccagcgtgttctcgttatatgccgggaacggcgctcctgcaagatagcgttcgacatcggcatcctcgaaatacgccaaggccacgcggccggccgcgccagcatgtagaggcagcacgcggcccgggcgcaggatcagcgaatcgatggcatgaccttgcgcgcattccacgcataccaattcagtgccggagaccacactgaggaatgaggtcatgccggtttgcgcggtgatggcatgcatgaccgcaatcgcaggctgccattcggtacgagacgtgcgagcggcatcagccaatcgcagccagtccagcgataatgagtagttgccatccgtatccgttacggcccaccccacatcgaccagtccatccagcacacggtatacggaggatcgcgggatatcacaggcgtcggcgatatctgccggagacaggccattctccgccgccaatgcgtccatcacacgactcgccttgtctaaagcgcgggtcggttcacgtttgtcttccgccatcgccgacgttccttccccctgacttatccctgactcatcgtattcaactgctcaggccaagataatcaccgctgtatccaaggcctcgcgacacctcgcggccggcagtctgcaccaattgcaccatgtcttgagccgatgccgttgccggtttcccatctaccagacaggccagctcaggttccaaggagcgggaaaggccactcagggcgattgccgcctgaatctctccggcgtgattgaataccggtacgctgatagtcacggagccggccatggtctggccgacatcataggtgaagccgcattcacgtatatgacgagcctgtcccattgctgtggtacgcatcgtggagaatgtgccgccgagctcgttgttataggcatagtgttccaacagctgctcgtagcgagccgggggaagccaggccgtcagtacatgagagggagcgctcatgctcagaggcaagctattgcccaccagctgtgcatagctttgcaatgcctcacgggtgcgtgtctcgatacacaccgtgcgcaatcgcctccgaacgaacagaccccagatgccgaactggccacgatgggcgcggaaggtacggcgagcgatctgctgaatgtccagtctgctttcgatttggccgccgatacgtacgcaatcgatgccaagccgatactcgccacgattgatgccgcgttccacccaaccgactgcggcgagattatccagcaaacgatacgttgagcttacgggttcaccagtacgttcgcttatggtttttgcggtgcttggtcccagttccgccaatacatcaagtactgccttggatttcaccaatgcatctacgctacggtcatcacggcttggcgccaccatgcgcgtcacctcctggcctgtatgttgatacctcagccatcttaccgggtattcagcgggttgccgcccaaaacgcactgggccccggcaggagtatcccgtcggggcccaagaggtttctggctcccctctttgagggggagccgtccgcgcggcggaccgggggagatccgagacgctaaggcccaaggacgcgagaaacaccccgacgcgcgggtgtcctgatatggggaaagccccttggggcgtgtgctccgaggggcttcctgtacgtgtggtgcggcggcgtgctactctcccacaccctgtcgggtgcagtaccatcgccgtgccaggccttagcttccgggttcggaatgggaccgggcgtctcacctgggccatggccgccgcaaatcttctcttgtacggtcagacgctggggtctgccggcctgtggcggcctgggaaccggacagcggacgcggatatgtcgatgtttcgtcttgtggccagacaatgctcattgccgtctggtgccgtttgcaggaggaagatgcggtccaaccgccaggggttggaatgttagtgttgcctttcgtccgttagtaccggtcggctccacccctcgcggggcttccacgtccggcctatcgaccacgtgttctgcatggggactacaggaactcgaaggttccacggaatgcttatcttggagcaggcttcccgcttagatgctttcagcggttatcccttccgaacgtagccaaccggccgtgccactggcgtgacaaccggcataccagaggttcgtccacccaggtcctctcgtactatgggcaggcctcctcagcattccaacgagcgcagaggatagagaccaaactgtctcacgacgttctgaacccagctcgcgtgccgctttaatcggcgaacagccgaacccttgggacctgctccagccccaggatgcgacgagccgacatcgaggtgccaaaccatcccgtcgatatggactcttgggaatgatcagcctgttatccccggggtaccttttatccgttgagcgatgccgcgtccgtacaccggcaccggatcactagtcccgactttcgtccctgctcggaccgtcgtcctcgcagtcaagcccgcttgtgcacttgcactcgccacccgattgccaaccgggctgagcggacctttgggcgcctccgttactctttgggaggcaaccgccccagttaaactacccgccaggcactgtccctgaacaggatgactgttcgaggttagacatccaatgcgaacagagcggtatttcaccttacggctccgcgcgatctggcgaccgcgcctctcggcctcccgcctatgctacacaatccacaccgaatgccaataccaaggtatagtaaaggtcccggggtcttttcgtccttctgcgcttaacgagcatctttactcgtactgcaatttcgccgagctcctggtcgagacagtggggaagtcgttacgccattcgtgcaggtcggaacttacccgacaaggaatttcgctaccttaggatggttatagttaccaccgccgtttaccggggcttgaattcaccgcttcacccgaaggctgacggatcctcttaaccttccggcaccgggcaggcgtcagtgcatatacagcggcttgcgccttcgcatgcacctgtgtttttggtaaacagtcgctaccccctggtctgtgccacccccaaaagctcccacagcaagcgtgttcaccatcgggggtctcccttaaaccgaaggaacgggagtgatttgccgagttccttgaccaggattcgctcgatcgctttggtattctctacctgaccaccagtgtcggtttggggtacgggcggctttgagcctgacgccgaagcttttctcggcagccgggatcaccggatatcgggccataaggcccccatcatcgcacctcggacccatgcgggacggatttgcctgtcccacgccctgcgtgcttgaccacggaagaccacctccgcggccggctacccttctgcgtcactcctgcgctgacctactacaaggaccggtcccaacaggccagggcatcccgcccccgaaggagcagtaagcccggacccggaggttagtactccaagcctcggttttggcggctgaaagccggtacgggaatatcgacccgttcatccattcgactacgcctgtcggcctcgccttaggacccgactcacccagggacgatgaacgtggccctggaacccttggtcatccagcggacgggatcttcacccgtctctcgctactcatgtctgcattctcactcccatgaagtccacggcgcgttcacacggccgcttcgcccctcatgggacgctctcctacccagtacaaaatactgccgcgtcttcggtggtgtgcttgagccccgctacattgtcggcgcggaaccactagaccagtgagctgttacgcactctttcaagggtggctgcttctgagccaacctcctggctgtctatgcgactccacatcctttcccacttagcacacgcttcgggaccttagacgacggtctgggctgtttccctttcgacgacgaagcttatcccccgccgactcactgccgggatacgcgtcaccggtattcggagtttggttgctgttggtacccgatacgggcccgcaagcatccagtagctctacccccgggacgtaatgacccgacgctgcacccaaatgcatttcggagagaaccagctatcacggaatttgattggcctttcacccctagccccaagtcatccccccggttttcaacccaggtgggttcggtcctccacgcggtcttacccgcgcttcaacctgctcagggctagatcatcccgcttcgggtccaggacacgcgactcaaacgccttttaagactcgccttcgctacgcataccccacacgggttatgctcgccacatgccactgactcgcagactcatttttcgataggcacgccgtcaccccacaaaagggctccgacggattgtaggcgcacggtttcagagactgtttcactcccctcccggggtacttttcacctttccctcacggtactcgttcgctatcggtcagacaggaatattcaggcttacccaacggtctgggcggattcgcacggggttccacgggacccgtgctacttgggagacgcgatcggcagaccatgcgcgttcaggtacggggccctcaccctctgcggcccggtattcaacccggttcccctgacacatggttttctgcaactgccggccggcccgtcggagccggcgcacgcgatcccgcaacaccccgcgcgcaacccccgacgggtatcacacgcgcaaggtttggccatcatccgctttcgctcgccactactcacggaatatcctttcctgcaggtactgagatgtttcacttccctgcgtaccccccggccgaagccggtaccgacccatgacggtcggtgggttcccccattcggaaatcctcggatcaaagccctgttggcggctccccgaggcatatcgcagcctcaaacgtccttcatcggtcctgtctgccaaggcatccaccatacgcccttgcaagcaacacacaccacgaaagtgcatggccgcaagattcctctagcaaattcccagacgacaaatcatcacactaaaaatgatcacaaaacgatcgaaacgaacaatagagttcgattcgaaatcaacagcaaaacaaagattcaaaaacccttgttttgctcgcgtccactatccagttctcaagccaccacgcaccgccacgccatcgcgccggcacacggccggcccccaggcacgacgggcatcgaatcgcgccaggcaaaaagcctggggtggcgatccgggagcccaaaagcgcatccataccaccccggcacccaccgcacgaccggcagggcaaagccaacgacgtcttccacaccagcaaccccgccgccatcgcaccatgcgacgcgcggggcgcacaccgtcggacgaacatccgactgaattctccgtagaaaggaggtgatccagccgcaccttccggtacggctaccttgttacgacttagtcccaatcacgagcctcaccttagacggctccatcccacaaggggttaggccaccggcttcgggtgctgcccactttcatgacttgacgggcggtgtgtacaaggcccgggaacgcattcaccgcgacgttgctgattcgcgattactagcgactccgccttcacgcagtcgagttgcagactgcgatccgaactgagaccggttttcagggatccgctccgcgtcgccgcgtcgcatcccgttgtaccggccattgtagcatgcgtgaagccctggacgtaaggggcatgatgatctgacgtcatccccaccttcctccgagttaaccccggcggtcccccgtgagttcccggcataatccgctggcaacacggggcgagggttgcgctcgttgcgggacttaacccaacatctcacgacacgagctgacgacgaccatgcaccacctgtgaacccgccccgaagggaagccgcatctctacgaccgtcgggaacatgtcaagcccaggtaaggttcttcgcgttgcatcgaattaatccgcatgctccgccgcttgtgcgggcccccgtcaatttctttgagttttagccttgcggccgtactccccaggcgggatgcttaacgcgttagctccgacacggaacccgtggaacgggccccacatccagcatccaccgtttacggcgtggactaccagggtatctaatcctgttcgctccccacgctttcgctcctcagcgtcagtaacggcccagagacctgccttcgccattggtgttcttcccgatatctacacattccaccgttacaccgggaattccagtctcccctaccgcactcaagcccgcccgtacccggcgcggatccaccgttaagcgatggactttcacaccggacgcgacgaaccgcctacgagccctttacgcccaataattccggataacgcttgcaccctacgtattaccgcggctgctggcacgtagttagccggtgcttattcaacgggtaaactcactcacgcttgctccccgataaaagaggtttacaacccgaaggcctccatccctcacgcggcgtcgctgcatcaggcttgcgcccattgtgcaatattccccactgctgcctcccgtaggagtctgggccgtatctcagtcccaatgtggccggtcgccctctcaggccggctacccgtcgaagccacggtgggccgttaccccgccgtcaagctgataggacgcgaccccatcccataccgcgaaagctttcccagaagaccatgcgatcaactggagcatccggcattaccacccgtttccaggagctattccggtgtatggggcaggtcggtcacgcattactcacccgttcgccactctcaccaccaagcaaagcctgatggatcccgttcgacttgcatgtgttaagcacgccgccagcgttcatcctgagccagaatcgaaccctccacaaaaaaacttcatgaaaagcatccgaatagatgactctcaaaacaaaaattgacgagcacgtccttaaggaaggacgccctcaaaaaacctcacccctcatcaaaccctcccgggtacccgaccaccacgacaggcaatcaggcgaggaatgaactggcaatcattgactataaagaagtagtacaaacacgctcttgagttctcaaaccaccaccacaccagccagacgggaaaccaaccagaggaaggaacccgccgcgctgagcggcaacaggtgaataacttacacgcatgtccggattcacgcaaatcaaggcgcacgaagataagcccaaatcgttgaaacgacaggcttcgcccggcgtgtcgcaaacagcctatttgcgctgttctgatatcagaataatccgttttgcattgccgatgcgtaacaaattcatgtgttcatcggcgtgttgcaagaattcgattgcgtgaccatccaggttcaccttctcgcaaccggtcatcgcatatgcaaaaagggacttccctttacgggaagtccctttcagtagctattgaagctcgctagcttcaggccagggtgttcgggtcaaccggaacgcccgggttcatcgtggaggtgatggttgccttggtcaggtaacggcccttcacggtggacggcttcagacgcttgacttcgtcggccacagccttgaagttctcgtccagagcggactcatcgaagctcatcttgccgatgaggaagctcaggttgccgttcttgtcgacacggaactcaatcttgccgcccttgatgtccttgacagccttggtgacgtccatggtcacggtgccggtcttggggttcggcatcaggccacgcggaccgagcacacggcccagacggccgaccttgcccatcatgtccggagtagcaaccacggcgtcgaagtcgaggaagccgccctgaacctttgcaatcaggtcgtcatcaccgacgatgtcggcgccagcctcggtagcctcggtagccttcgggccacgggcgaacacgaggaccttggcggtcttaccagtgccgtgaggcaggttgacggtaccacgcacgagctggtcggccttacgcgggtcaacgctcagacggaacacagcctcgacggtctggtcgaagttgtaggagggcatgctcttgagcagagcgatggcctcgttggcggtgtagaggttgttgcgatcgacgcgctcagcggcttcgcggtacttcttggaacgctttaccatctgtccttctccttatcagtccgtaaccgtgatgcccatcgagcgagcggtgccctcgatgatcttcatgccggcctcgatatcgcgagcagacagatcttccatcttgatctcggcgatttcgcgaacctgcgccttggtgacagagccgaccttgtgggtcagcgggttctcggtgcccttctcaacgccagcggccttcttcagcagagctgcagccggcggggtcttgagcacgaaggtgaaggaacgatcttcgtaaacggtgatctcgacagggatgacctgacccatcttgtcctgcgtctgggcattgtatgccttgcagaagtccatgatgttcacgccatgcgaacccagagccgggcccagcggcggggccgggttggccttgccagcctggatctggagcttgatcagcgccgagactttcttcttgggagccatattatggttcttctttctataacgcggttcgaatggtcgccgtcctcaggttcggctgtctgccatcatgctcggtcttgactcattatttatccgtgcatgctgtaggcaatcggcctgtggtcggtctcctcccgcaacttatattgctgtgctgtgctagcgagtctcctctccagacacaagctttcctattatgcaaatccacccggacaacacaaaaagcccgaccacgatggtcgggctctgcaaagtttgggagttaatctagcttctgaacctggtggaagccaagctccaccggcgtatcacggccgaagatggacacgagcacggtgagcttctgagtggtgggctccacgtcggaaacaacggcggccatggtggcgaaaggcccatcggtgacggtgacctgatcgccaacggcgtaggagacctcgaccctgcgcttcttggcggcggcgggcttgtcgccggcggccttgagtgcctcggaagcaatcatcggagccatcatcgccacgacttccttgcgggagagcggcgccggatccttggtcgggccaacgaagccggtcacgccttcggtctcacgaacgatacggcgggcgttctcatccggccacatacgaatcagcacgtagccaggaacacgcacgcgggtgatgaccttcttgcccttctcggtgtgcttctcgacttcttccatcggcacctcgacctggaagatctggtcttccatgccgaaggaggcgacgcgggactcgatgttggtcttcacgcgcttctcgtagccggagtaggtgtgcagcacgtaccacttgccatcaagggaacgcagggacttggagaattcgtcaacggcctgctgaccggcatcggtctcctcggcctgctcggattcgttgacttcttcctcgtcctcatccagagaaacggtctcggtctgagtggaagcaacgggagcggattcagtcgccgccggagcgtcggactcaacatctgcattgtcgacggatgcgtcagattctgcggaaaggtcagcgaccggttcgaccggggcagctgcctcatcggcagcagcttcggaagcctcgacaacaggctcctcagccgggacggcgtcgaggttctcgagattcagttcatcactcatgcgttgttattcaccttaggttgtgcggatcagccgaacacccacagcgtggccttgcctagaccgaagtccatgccagtcacgagggccatcagcagcagcacgaagatgaatacggccagagaccagaagaacagttccttggcggtaggggtcacgaccttgcgaagctcgtcgatgatctgcttgatgaacagaccgatacgcatgaagacattcggcttgactgccttttcactcttgctcgtcttagccattccgtacctcgcgtcagctgcttgattattagaaacttggcagggaaggcgggactcgaacccacaacctacggttttggagaccgttgcgctaccaattgcgccacttccctaggtgaaaatccacctcggcgtgcgttccgtagagaacgcttcgccacggcgaaaccgccaagtcgttataataacgactccggtggattatcgcaaatcgcgtgtcgcgcgcgtagcacgcgactcttctcagttagcccattccttgaatcgacgcatgccttcggctaggtcttcgtcggccagtgcgtaggagaaacgcaggtaaccgggagcaccaaaggcctcgccggggacggcggccacgtgggcctcatccaacagtgcggcggcaaagtcagcggacgtatcggacactgtgcccttgggacccagcggcttgccaagcaaagcggtgatgtccgcaaaagcgtagaacgcgccggtcggagtcgggcagttgacgccctcgatatcgttcaaggcggtcacaatcgcacggcggcgcgcgtcgaaggccttacgcatctcgtgcacctcatccagcgggccggccacagcagccaaagcagcacgctgggagatgttggccacattggaggtcatatgaccctgcagcttggcggcggccttggccacctcaagcggagcgaccatccagccgacacgccagcccggcatcgcataggtcttggccacgccgttcagcaccagcaactgcccgcggcattccggcacggcggcaccgatgtaggtggtgtgcgcatcgtcatagttcaggtgctcgtagatctcgtcggagataacccaaatgtggtgctcgacggcccaacgaccgatcgcttccacggtttccggcttccagacggctccggtcgggttgttcggggagttgacgatgattgccttcgtatgctcggtacgggtcgcttccagcgcctcaagcgagggctcgaagttcacgtcggcaccggcgaatacttcgaccggcacaccaccggcaagcttcacagcctcggggtagctggtccagtacggagcgggaatgatgacctcatcgccatcgttgagcaagatctggaaggattcatacacggcctgcttgccgccgttggtcaccacgacctgatcggcattgacctcatagccggaatcgcgcagcatcttagccgcaatcgcttcgcgcagctcgggcaggcccggcgtaggcgtgtacttgtaattcttcgggtcaaggcaggcatctgccgcagccttgaccacgtttgcgggggtcgggaaattcggttcacctgcgccgaagccgacaacgtcaagtccggcggccttcatggccttggccttggaatcgacggcgagcgtagcgctcggtgccacagtgttgatacggtcggaaagagtctgccattgcgccatagtcatggctcccatgctaaacctacagcacgaaaaatcgccagagccgcactatggtgatggaatctgtcgtgtgacagattccatcagtcacacgagcacgagattgtcgcgatgaaccagtgggtgggcgtactgggggccgaggaaacgcttgagttgggcggtgttacgcccgagcatctgcggaatttcttcggaatcgaagccggcgaggcctcgggccaggtgttcaccgctttcggcatcgatccagaccggatcgccggcggaaaaatcgccatgtacttcgagcgcgccggccgccagcagcgaggcacgcccgccgcgaatcgcctggccggcacccgcatcgaccacaatcgtgccgcgcgggtcggcggcgaagccgatccacagacggcgtgaggagccgcgggccttaaccggtgcgaacacggtgcccaccggatcgcccatcatcgcagggcccgcgttcgaggcgcaggtgagtaccgtggggatgcccgagacggccgccacgcgcgcggcctcgagtttggtgaccatgccgccggtgccgaccttggagccggagccggagacttggatgtcgcccagcgcatcaatcacgttgggcacatattccacacggcgggagccgggctgcgagggcggcgcagtgtacagcgcgtccacgtcggtcagtagcaccaaggcttcggcccgcaccaggttggccaccaacgcggagagtcgatcgttgtcgccgaagcgaatctcgttcgaggccaacgaatcgttttcgttgatgatcggcaccacgccgaggtcaagcagacggtccagcgtgcgttccacattgcggtactgggtggcacgaatcgtatcttcggcagtgatcagaatctggccgacgcgaataccgaatcgaccgaacgcagtctcgtagcgggccatcagtagcccttggccgacggctgcggtggcctgctgagtggccacgtccaccggccgcgagtcaaagcccagaggcccgaaaccggcggcgatagcaccggacgagaccagcaccacacgtccgcccatcaatcggacctgagccaaggccgcggccaacgcgtcgagcttgtccgggtcgaggtgaccgctcggctgggtcagcgagctggagccgactttcacgacaatggttccggctgcggcgatcatgcgccgcacctcggcctgactcggagtgctcatttattcctcggtttcaccatcttcgctggactcaccgtggccgaacaggctggtttcgtcatggcgatcgtcgtcaacggtcgggtcggcccagtggccggccttgcgttcggccatcatcgcgtcgcgcacggcggcacgggcgtccatcatctcgtggtattgggcacgacgttcggcgttggagcggcggtgcgtgcgcgggtccagctcttcgagacgcagatccttgcctcgggcaccgaggttggagccgtcgagcatttcggcaccagcggagatggtcggatcccaatcgaattcgaccatacgggcaccacgaccgatgcgcacttcgtcgccggggtgagcacccttgcggcgcagctcgtcctccacgcccagcttggccaagcggtcagccaggtagcccacggcctcgtcgttgtcgaagttggtctgcatgacccagcgctccggcttgacgccacgcacctcgaagaacacttcgccattgccgagttcgcggcgctcgaccgtgaactcaagcgcactgccgccctcgtcagcacgacgcggacggcggcccttggtctccaatggcttgatgaccacgcgagcctcctcttcggcctgctcgcggttggccacttcctcacgcatctcgtgcaccagcgcagacaacgcgaagttgagctcctttagaccctcgtgcgaggcagtggagatctcaaagaccttcagcccgagtttctcgaactccggacgcacgaactcagccaattccttggcctcgggcacatcgatcttgttcagaatcacgatgcgcgggcgttcgggaatcgggatggcacccaacggcagctcgagcttgtcggcgtagagcgccaactcgttttccagcgcgtggtagtcggacatcgggtcgcggtccggttcaagcgtggcgcaatcgatcacatgggcgatgatttcggtacgttcgatgtggcgcaggaactccagtcccaggcccttgccttcggaggcgcccggaatcaggcccggcacgtcggcgatggtgtatcgagagtcgccggcgataacgacgccgagattcggcaccagcgtggtgaacgggtagtcggcgatcttcggcttggcggaactcatcgccgcaatcagggacgactttccggccgaggggaaaccgaccaacgccacgtcggcgatggacttcaattccaaaatcacgtcgcgctcttcaccgagttcgccgagcagggcgaagccgggggcgcggcgggtcttgttagccagggcgatgttgccgaggccgccggcaccgccttgggcgacgacgcagcggtcgccctcgtggcgcaggtcggcgagctgcgcgccgggatgcttggctttgccctgttcgccgcgcgcctcaaagacgacggtgccgcagggcacgggcagaatcaggtcctcgcccttggagccgtccttattgtcgcccaaacccatggtgccgctgccggcgacacgatgcggcatgaaacgatagtcgagcaggctggtggcgttacggtcggccacgaacaccacggaaccaccgtcgccgccattgccaccgttcgggccggccaacggcttgtatttctcacgacggatgccggccgaaccgttgcccccatcgccgcccttgacatggacggttactcgatccacaaaatcactcatattgattaccttacaaaaaagccgcgtccttacgggcgcggcttgaaaaaagcttgacgctatatcgctcaggcgatgacgtcgacaaccttgcggtcgcgacgcacaccgaacttcacggagccatcggtgagggcgaacagcgtgtgatccttgcccatgccgacgttgtggcccgggtggaagttggtgccacgctggcgaacgatgatgttgccggccacgacggcttcgccgccgaacttcttcacgccgaggtattgcgggttagaatcgcgaccgttgcgagagctggacgcacccttcttatgtgccatgattcatggtcctttctataactcaggcaatcgccgtgatcttgacgatagtcagcttctggcgatgacccttacggcgagcaacaccagtcttgttcttgtacttctggatgctaatcttcgggcccttggcttcgtcgttcacaacctcagccttgacggacaccttggccagatcggcggcggcaagggtgaccttgtcaccatcgacaacgagggagaccgggaattccacggtatcgcccttcttagcgtcgagacggttcacgaggatgacgtcgccaacctcgaccttttcctgatggccaccggccttcacaatcgcgtacattatcgttccttttatgttttggaaagctaccttgcctaacacgcaccgagcttgcggtcagacaccgagtttcgaatctacaccaccatgcggactaaatcaaatgatttttgcccgcgtgtcaagcacgacacacctgttactcttccgcttactcttccgccgtgttgttggcagcgacggcagcggcggcaatctgagccagtttggctttgacgtcggcgctggaaccagccggttcgggagcgggagcggtgccgcgaccgtgcttgttggttttgacgaacgggtcgccaccgcgaagcgcgtagggatcgtcgtagtcggccgaaacgatcggctgatcatgcaggatgaaaccacggcccttgcaggtcgggcattcctcggagaacgcctcgaccagaccctggccgatgcgcttgcgggtcatctgcaccaaaccgagcgaggtgacttcggccacctgatgcttggtgcggtcgcgtgccaagcattcgaccaagcggcgcagcaccagatcgcggttggcgggcatgaccatatccacatagtcgatcatcaccatgccaccgatatcgcgcaggcgcagctggcgggcgatctcttcagacgcctccaggttgcaacgcgtcaccgtttcttccaaggacttgcccttgccgataaagcggccggtgttcacgtcaatggtggtcatggcttcggtgcgatcgatgacaatcgagccgccggacggcaggtagacctgacgctccatgcccttacgcagctgggagtcgatggaccacttgtcgaacacgtccttgccttcatgctcggccgggtcccacttctccagcttgtccttcaagtcgggggccatggtgtcaaggtattcctcgatacggtcgtagaccttgtcaccttccacgatgagcttgctgaagtcgtcgttgaagatgtcgcgcaccacgcggatggccacgtcgggctcgccctgcaggagcttcgggcgcttgccgtgccagaattcctcgcgcttggcgttgatgcgctcccactggcggaccagtgattcgagatccttgacgatggcgtcttcggatgcgccctcggctgcggtacggatgatcacgcccatgtctttcggggcgatcttggagacgatgttcttcagacggctgcgttcgcgctccgaaagcttgcggctcacgccggtcatgccgccggatggcacgagcaccaggaagcggccggcgagcgtgacctgagaggtcaggcgggcacccttgtggccgatcgggtccttagtgacctgcacgagcaccgggtcgccggacttgaacgccagctcgatgcggcgcggctggccttcgagacgagcggcatcccagttgacctcgccggcgtagagcacgccgttgcgggcctggccgatgtccacaaatgcggcctccatgctgggcagcacgttctgcacgcggccaaggtagatgttgccgacggtctgtacttcctgaatgtcggagacgtaatgctcgaccagaacattgtcttccaccacggaaatctgggtgtgatgttccttctcacgcaccaccatcaggcggtccacgttctcgcggcgtgcgaggaagtcctgttccatgagctggctctggcggctgcgctcacggcggttgtcacggcggcgctgcttcttggcctcgagacgagtggagccctccacatcagtgatctcgtcgatgtactgctgcttgcgggagcgtcggaccagcggctgttcgctgttctgactctggtcgtcggtgccctcgccgttcttgccgccacgacggcgacggcgacggcgagtaacggtctgctcctcatcgtcctcatcgcgatcacggtcatgatcatcgcgatcgtcacgacggcgggaacgcgtatcttcggcatcgttctcggcggtatcgtgctcgccgttggcaccggtttcgccgcgtgagccgcgacggcggcgacggcgcgaacgggtgcgggtggcgtcggattcttcgtcgccctcctcttcggcaatcggcgagtaggcgatatcgtccagctcgaggtcttcctcaatctgctcgacttcggcggctgcacggcgctcctgggcgttcaggcggcgggagcgacgggaacggcgagagtcggaagcgtcatcggaatcgaaatcatcatggtccgtgttggcgctggcattggcgtcaccggcggcagcgttgcgggcagcgtcacgagacgcatcacggtcggcggcattgcggccacgatcgtcacggtcgtcacggcggcggctgcgcggctgcgcgtcgtcatcatcgtggctgcgcgagcggcgggagcgacgcgacggacgttcgtcgtcgtcaacatcgtcatcacgagtgtcagcggtatcgtgcgcatccacagcggcgggcagtaccggttcctggaagagcagggacgtcatcggcttgccgcgacgcacggcctcgtggccagagggcagggattcgaccgcgtcgaacaggcgctcatccggggtgtcctcgtgcgtatccgcaactgcacggcgagaacgacggcgaaccggacggtcctcgtcatcatcatccatatccatagacgcacggcgagagcgggagcgaaccggccgatcctcgtagtcatcatcgtcggactggcgggagcgagagcggcggcgaaccgggcggtcctcgtcgtaatcgtcatcgtccacaaccgaacggcggcgggaacgtggggcgtcatcgtcatcgaaatcatcggcactgacagtgcggcgcgaacgacgaggacgatcatcctcgctatccgagtcggccactgcggaagcggcgcggcgcgaacggcggcgggttggacgttcggcggaatcctgggaatcgctggattcatcggaatcgctggaatcggctgacttggaatcggccgcagtgccggcatcgggaagcgcgggggcttcgaacagcggggcgcgttcctgcacttgcagttccagagaagcgccggcagcaccggtgccgcggaccacgcggcggccgccacgacgacggcgaacaggttcggcgggctgggaggcggcggcaggcgcagcgttcacggctgcagccgaatcggcattggatacggttgaattatcggttccgtcgttgacgaaaccttcacggttgtcagtgggcacaatgctcctcgcggcgcgctgcatcacgacgcctatttccaggcctatacgcttgtctcacaccacgctctcaccgtggccgcacgaaaacgcgccgcgtaaaggcaacttcgtctcaagtctgtcctgcgggtggcggacaccggcgcttgcgttgtctcattctcaagagccgcaaggggatcgacgccatctcgcacgctgatggttatgcagaaccaccatcctttagtatgccacatattttgtgcgggcgtggcccggcgaggctgacgttctctcggctcccctcccccgcggtgacagctcccctcagggaggggagctagagaggtgtcagaccagccagtcggtaaggattgcggccatggcggtcaggtcggattcgggcacctgctcgtcgtgcttgtgagccagcagcggatcgccggcaccgaggttgacggccgggataccgagctgagagaagcgtgccacgtcggtccagccgagcttggccagcgggtcgcggccagtgcgctccttaaccagtcggaccagatcctgggcgagcggggcgttcaggcccgggcgcgcggaggggctttcgtccttcatttcgatgccgtagccctcgaacacgccgccggtagccacatgctcgccattgccgagttcggcaccggcgtccgcgcccatcatcagagccttggcctcggccaacgacttgtccggggcgaagcggtagttgacgtgcacgcggcattcatccggaatgacgttcgtgcctttgccgccggagatcagcgtggcgttgaggccctcgcgatagtcgagcccgtccacgttcacggtggccggctcgtaggcgttgagtcggttcaggatgtcggccgccttgtggatggcgttctcccccatccatgcacgggcggagtgcgcggccacgccgtgggtcacgacgtcgaagcgaatcgtaccgttgcaaccgccctcgatgccgctgttggtgggctcgccgatgatggcgaaatcgccggtgatccaatcgggatgggcctcgacgactttgcgtaggccattcttttcggcgacgacttcctcatggtcgtagaagacgtaggtgaggtcgactttcggggtggtttccggcgtgcggccgtcgagcgtggcggcgaggtagagcatcaccgcgtcggaggccttcatatcggtggcaccgcggccccacagcacgcggtcttcgggatgagcgtgggcgatttcttcgcgaatcagcgaatcgccgggctccagccactttggtgggaaattgtcgatgaccggcacagtatcgaggtgcccggccaagatcacacggctcggcttgccgaagtcggtgctggccaccactgtgtcgccgtgacggcggacggtcaggtgctcttgctcgttaaggaaggcctcgacctcgtcggtgagggggccctcgtggtcggacacggagaagttctccatgatctgggtgagcaggctgttcagctgctcggcagtggatgcggtgcggttcaattcaagcgtcatgtgaacagcgtaccgcgtgggcggcgggcccagcacactcactacatgagattttgcggccgaatacatttttatgtgccacactggggtggcgaaagggaggattatgtcaggtctaatcagcgccatgcaaggcttctgcgttatcggcatcgtgattgcggtgggatatgttgccgcacgaatgcgaatcggcgggccgtccgctcagatggtgctcaaccggttctccttcttcgtatcgagcccgtgcctgatgttcgcgattctctccaaggagccgattttcgacatcttccacccctcgattatcgtggcgttcttctccgccgtgctggtaggcgtggtgtttttggtgctcaaccgtatgttcttccacctgaatgccccggacgccaccatcggtgccctgaattcgctgtacctcaattccaataacatcggcctgccaatcgccacctacattctgggcaatccggctcttgtggcaccgattctggtcatgcagcaggccatcttcacaccggtgggcctgacagtgctggacgtgaccaccaagggcaaggtctccatcaaggaaatcgccaagcagccactgcatcagccgctgcttatcggctcgctgctgggcattgtggtctctgcgatttccgctaaaagcggctggttcccagtgccgaaattcattttcgacccgatcgacatgatcggcgattcggctgtgccaatgatcctgatggcgttcggcatgtccctgcacggcaccaagccgctacagcagaagggcgatcgcccggccatcttcacggtcgcggtcctcaagaacatcatcatgccaattatcgcgttcctgctcgcctacttcgtgatgggcttccgcggctccgagctgtacgcctgcgtggtactcgccgctctgcccaccggccagaacgtatacaactacgcggcccgctacaacgtgggtctcaccttcgcgcgcgacggcattctgatgagcaccatgaccagcccggtgtttatcgcgatcatcgcggcgctgctgtcgtgatgggtgcgcagagaagcgttctcaatagtatccgtgcgcgcaaatgcacagatatcgcacaaacgaacatttgctcatccgcatatttgcggtgatttcagcgtttctacgttcgatttgcgtatacgaaagtacgcacagttgttattgagaacgattcgctgcgcagctcggctcagtcatcagcccgataatcggtcagattcaagctggccgccacatgattggacgcgaacgcgccgatggaaaccagcgcatagcacaacacaagcccgccgaagaagctggccagcgtggccggttcggtcatcgaagcggcgaacagaggggccataagcagcatggaacagccgccggccacgatcaccacgatgttgagcggggtgagtacctcgatgaatcgcgcacggttcaaggtcttgacatcagtgccctccaacaccagcatgcgatattcgccggcctgatcgtacacgctgccggcctgcatcacaccggagctgaccgcggcaagcacagcggcgaacacgagcgtcagaatgccgccggtgccgatgtcgcgaatgaacacggtgaacgggtcgttggcgtcatcgaccacggcggccgatccgaagaatccgcagatcgacgtgatgccggcgataaacacggccaacgcaatgccggacacattgcgccaggcgcgcttagggttgtcgagaatacggcgcatggcaatcatcgtggccgcatccttggggcgcttggccttggccttggcgcgagcggtgatcacccacgtgccgataagattcaccagcgcgaagcacagcagcatgaaaccgatgatcacgccgtacatcaccgcctggccggcctgagccagcatggccgggttcttgaagacgatcatggccaccaccacgactaccacgaacagcaccatacgggtgcctgagggcaatgcggtggcggtgcgcgaggtgacacccaatggggtgattgccacgcggcgcaaggtgaccagcgacgatatcagcgccaagatggccacgcccgccaaggtgattaccagcgccagcgggccgacccatagctgttcgaaggtgaaccgctgctcctggaagggaatcagcatgactgccggcatcagggcgcaatagccggcaatgccgataagcgcgccgatcagcgcctgtccggcggcgtcaagcgcggtgagacgcaccacctgaccggtggtcgcgccggccagacgcagggcggcgagacgggcgtcgcggcgggatgcggccagtcgtgcggcggaaccggcgagcgccacgaacggcacgacgagcagcatgcaggcgaataccgccaacgccacataggcggtggagaattgggccaggctcgtcgggtcgctgatctgccgtttccacgcggccaccgtatcgggccggcaggcaccgaagtcgaacgcgcaggcgacggtatgatcggccgaagcccgccagatgaaaccgtgtacgccgccgagcacggtgaggaagatggtggtggctgcggcgaaggcgatgattgccagcatcgaggtgtggccggcgctgccgcgcaagccggggcggtgaaacagccgccagagggcgaacgtgctcatcgcgtgcctcctgcggtggtttcgctcccgccggctggagctgccgagcgtagcgaggctgagggtggttcagcgccctcgggccacccccagtcagcctgcggctgacagcccccgccagcgggggcggagttggggttggcgtctgtctggtgcagacggccgtcctgcatcattacggtacggccgcagaacgaagcgacgttggggtcgtgggtgacgacgaccacggcggaaccgttgtcccgcgcggcggccatgagaatgcccatgacctcgcggccggtggcttggtcgagcgcgccggtcggctcgtcggcgaagaccacggcaggtttgacggcgagtgcacgggcgatggcgatgcgctgcatctgtccgccgctcatctcccccggccggtgcgtggcgagcgcgcgcaatcccatgcgttccagccacaggatcgccgtgtcggtggcggtgcggtagggcatgccgtcaagcatcatcggcagggcgatgttttcgaccgccggcagttcgggcagcagctggccggactggaagacgaagccgaagtcgttgcggcgcagtttggtgcgctcggcgtcgctcatgcggctcaggtcggcaccacggaagatgacggtgccggcggtcggcttaatgatgccggcgagcgcgtgcagcaaagtggatttgccggagccggacgggcccatcacggctaccgtctcgccctcccggagcgtgaagttcacgtggttcagggcgagcgtgtgcatggtcggcatggcgaagccgggctgggctggctgggatggctggccggcctgaatggcacccggtccggccgcagcgggattcgccgacgcataaccggctcccgtgccggctggcatcacgccggtgacgccgtgccctgcctgtgcgcgggccatgctggcggtgtagtccatgaccaggtcgtgcgcctcgatgaccggggcccactgctgggtgtgcgatgccggctgctggaactgttggggttgctgagactgctgaggctgagccgccggtcccgacgccggctgaggctgctgcaattgcgatgctgctgtgttcatactcccgagcgtacggagcgaacgcccagccgaccatcgggctgcggtatgaacctttctggatcaccggcccgctcctcatccgcaaggattagagatacgcagtcgacgcgacaatccatatatcagatgttcattgctcgagaagacgaggaacagtggaagaccggttcgggagctggaaccacataggccggttcggctggatatgcgaatcgcacgcacggtatgttcagggaaccagcgcgctgcgcgcctgtacatcgaacagaccaagcaaaggagcccacatggccatcgcaatcgacatcccgcacacaccaatcgtgtccgtacaaaagtcgtacaacaggagtatgactacagagaataacaagaacagtcgttttgaaatgagactcacctaagagcaacgttccagaatcgaccaagcggccgagtccaaaggcatgacttcgttgcaatgggcattatcgaatctgctcgccgccgcagatcgggacatccatgaagctcatatcattcggctcaacagtaaagcgtggaatgatttcaccgcagcattaaacgaacctatgggcctacgtctgaatgaattgttggagcgtgatcccatatggacgtgaccaacttcactgagcctcggcacctgactgcgagcgaggatatttctggtttcgactgcggcctgccattggtcaatgattggctggtttccacacactaagtgcatacagcattgagcattcggaagctcccggttggctgaggcgaaatagtccgaaccccattcccgtaattttgctaggcatgatgggcgtggatatcagatttcaaaccatgcacgtcgacagtcagttactccgagatgcggtacttcattctctgaacgatatgattttcggcatatccctgaatcatctagaatgtttactccgctcaatgtccacaatcaccaatgattaatggctggagaccgctatttgacgccgaccattgtctgaatcgcattcagacacaacactcctcattgcgcgcagaccagcgagttccgccgagtcggcgatgtatctcttcggcggttgatttaggattttccgcatgcgacagctgaccacaccgctaaaaatgccattttcgcactgacttggggcggaggtcgtggcgaaacgcacgaggaaacgtgtgtcatccgatatggtcatgcccgccaggcattgaagcgtcctgtctatgcgcggttgatgtcccggtggcggggtcaatcgatcgacatacgaaccgggacagattcggctgtcccggttcgggatttcggcctcttttggcgaaccgggacaggcccttccatgaacacccgatatatgcaaatccaaaaccccggaattccgccattccccgacggcgaccatcgcacgatagggcgtcaggtgaatgagattctgtcccggttgcccaaaaagaggcaaaatgacgaaccgggacagcgaaatctgtcccggttgtcccaaaagagacgaaatgacgaaccgggacagcagaatccgtcccggtccacacgcggttcacacggcattacccaagtaaactcatcggcaaaacattggcccagccaacaccactaccgatgtccagcacaggccagctcgtccaggcgggcggcgaagcggggccagtcggtcttcatagcggtgaggagcttgcggttgggcacgtcgtcaatcgggacccagcagatttccatgctttcgtcgtcgtttgccttgggctcgacggtgtggccgggcttttcgaaggcaaacacggtggtgtaggcccacgggccgtggtcctcgcggtaggagccgactacctcgatgtcttcgggagtgatgttggcttcctcatagctttcgcgcagcgcgccctcgatgggcgattcgccgtccgcggtggcaccgccgggaataccccacgtgccgccttcggcgctccacgcggcgcgatgttgcatgaccacgtgggtcaccttgccactcaccgggtcgcgacgagccagcagaataccggaagcaccgttggtgccccaatgcttgcggccgcaggcgcagtccacccagccatcgccgggctggtgtacgttttcgaccggcggcagaatgccagcgtgctggttgcccgatgccttgctttccggttccagttcaccacggccgacattccacaggtcagtccacgtgatgcccagttcgccggccagatgccgggccagcggcaagctgaggccgatgatgccgtgcggatcgccctcaatactgtcgatgaacgcaccaccgaagccttccagcgtgaacgatccggcgacttccagcggctcgccagtggcaatgtaccgttcgacgtcggcatcggtgaattcgccgaaatggactttggcgtggcttgcgccgcgcacggtacgcccggtcgcgaaatcgatcaggcagtggccggtccacagttcgccggtcgcgccgctcatgcgcttcagtcgttcgcgggccacggcttcgctgtgcggcttgccgtaacattcgccgtccaggaggaacatcgaatcacagccgagaatcagcgggccgactgtcgcctcgggcagtcccggctgtccggcaatagcggtggcgatgggttcggtgacggtcggcatatcgatgccggagaagtcgcgcgtggtggcgatttccgccttggaatagtcaatgggcttgccagcggcggcttcacgcaagtcttcgacggcagcttcacgttccgaatccttgatttccttggccttgagcgggtaggcgatcacgcggtcaccggtcgcggcggcggcagtatcggccacatcacgatacgcccgatgaacggcctcggccttggccgcggccagaatcatcacgcgctgcttgatgctcagatcgtcgacggtgacgccttcttcacgggcggccgcttccagcgcagcaggctcatccacgtgtgagacgcgaattgtggggcagatacccgccgaatacagcacgtcacggcgaggcttggacttggaagcaagaattagcggaatggacatgacttaagtccttatgctcccgctggcgggagctgtcgaacgaagtgagactgagggtggtctctgccggtatggcggaccaccctcagaccgcctgcggcggccagctcccgccagcgggagccttctcctcgacttagcgacgctcgatttcgacgccggcggtgttgatgggcaggtgaagcacacgccaatggccggaagcaagctgctccgatgcgatctggtcgatggcttcgcgggcgttgccgtaatgcagcacgagcacgcaggggccggcaccggagactgcggcggcatagcccttggagcggaagagcgcaatgagctcggtggacggcggcatcagggcaccgcgatacggctggtgcagtttgtcctgcgtggcggtgaacagcagcgcgttggactgggcctgagcggccgcaagctcgtcagcgaacgccgattcacgggttccgccagcgcaagcgcacgtatcggcatcctgggccggggcagcggcgacgccggacttgccctgctgggcggcctgagccagcaccacgggattcatcgcagcgggcagcagacccacgcgagacacgttgtagacggcgtccttgtatggcagttccctaggcagcgcctgacgggccttctcagtggacagctcatagtcgggcacgaacacggcggcggtgatggacgggtccaccgggtagttgacggcgtggaatccgccgtgcagcggttcaccaccaggaacggcgaccgagccgacgccttctgcggtttcgaagtcccaagagacggtcaggccaccgaacacagccggggccacattgtccgggtgtccttcaatctgggcggccatatcgaagacggccggacggttgaggtcaccggtctgggcgaaggccgcggcggcggcgatgccggccacgatggcctcggcggaagagcccatgccacgagcctgagggatgttgttggtcgcttccagcgtgaagccgagtcggccgaggccgaacgtggcacaggcacggcggaaggtggagaccacgaggtgggtttcgtcgcgtgggagggtgtcggcaccctcgccgtggatgatcacgtgggcaatgccgtcgttcgggtcgtcgttgagcgtgaaagtgagctcgtcatggtagtcgagcgccagacccacggtatcgaagccggagccgaggttggcggacgtggcgggcacgcgcacgtgaacgctattgcagattggattcatggttgttccttaaaaaggagctccctcatcagagggagcttgggtattcagctttcaccgttcgaccgcctcatcagagggagcttaggtcttgtcagtccagcacgcgcaggatggacgggtcgccggtgacgaagtcgagcgcctgcacggccttgacggtgttgcgcagggtttcctcgtcggtcaggtgggtcacgacgcgcaactgctgaatctcgccgtcgtagccgggatcggtcatggtgggcttcaggtcctggttcacaccgttgatggagacaccgttcttggcgaactcagcggcgatggcggccagcacgcccggcttgtcgtgaatcaggaagcgcacggcgaatgcagccttggaggcggtaatcggagccttcggcagattcttgtacagcgggatggacgggccggtgcagccagcagcaatgtggcgggcttcggtcaccacgtcgcccacgacggcggaggcggtcggagcgccgccggcgccacggccgtagaacatgaggtcgtcggcggcctcggccttgacgaacacggcgttgaaggagccgtgcacggaggccagcgggtggttctcgtcgatcagggccgggtagacgcgggcggagacgccggcctcgccgttctcgaccacggcgagcagcttgatgaccttgtgttcggcggtggctgcggcgatgtcgtcggcggtgatcttggtgatgccctcaacggacacatcgtcgatggtcacggaggtgtggaagccgagggtggccatgatggcggccttgttggcagcatcgtagccttcgatgtcgccggtcgggtcggcttcggcgtagcccttggcctgggcgtccttgagcacgtcgtcaaactggagacccttggtggtcatctcgtcgaggatgtagttggtggtgccgttgacgatgccgagcatgctggtcaccttgtcgccgaccaaggactcgcgcagcgggcgcaggaacggaatcgcgccacccacagcggcctcgaagtagatgtcgacgcccttggcctcggcggcggagtagatctccgggccgtacttggccagcagcgccttgttggcggtgaccacggaagcaccggattcgatggcggcaagcacgaacttgcgggccacggtggtgccgccgatgagctcgatgacgatgtccgagttggtggccacgctcaaagtatcggtggtgacgatggactggtcgatccacgggaacttctcagtttccttcgggtcgaggcaggcgacgccggtcagttcgaccgggcggccgatacgagcggacagttcgtccttctgctcgacaatcaggcgggcggtctgggagccgacggtgccggcaccaagcaggcctacgcgaatcggggtttcgttgttgcgagccaattcagggtccttccaaaaagttttctatatcccaccgctattttacggattatttccgacagcagaccgaaagtactcatcaaagctgacggtccttttcgtattatgacggatttggccgcacattacagactgtcaggcgctcacctctgcacgctgattactcgctgacgtcgaggttgagtaggtcgtctacggtctggcggcggagcatgacgtgcgcgccggactcgctgacagcaaccaccgccggaatcagcgcctggttgtagttgctggccatggtgcggccgtatgcgccggtaaccggcacggcgagaatgtcaccgcgcttcaaatcggcgggcaactgcacctcgtgaaccacgatgtcgccggattcgcagtgcatgccacacacacgggcaagcatcgtttcagcggaaccggtgcggttcgccaagcgagcggtgtaatcagcgccgtaaagtgccgggcgaatgttgtcggacatgccgccatccacagacacatacacgcgctcggcaatcgggttgccggcactgtctttggcatcggacaagtgcacgtgcttgatggtgcccacgcggtacagggttacgccggcgggcgccacgatgtaacggccgggctcgaagctgatggccggggcgggcatgccgagcgcacggttggtgctgttgaccgcatccgccaagcgagcgagttccacgtcaatgtccattgaatcttcgccatcggtgtaggccacggagtagccgccgccgaggtcgatttcgggcaggatgtaggcgtcggtggcccacagggtcttgcgcagcagcatcatgcgcttggccgcgtgaatgaaggcgtccgcatcgtggatgttggagccgatgtgcgagtgggctccgaccagttcgagtacgtcctggttagcgaggatggtcttgagcacggcgatggacggaccgtccgcaatggcttccatcgcggcggccagcgctttgtctgcgtcggagacttcctcgtggctcaggtcgtacgggtacttgacgtcgtagtgcagctcgcgctctgatttctcggtcttttccgcgccattttccggggaatgcgtcgcagagatacgcgcgttggtagcggcaggcgtcacgtctttgaggtcgttcagcacgtcgagtacagcggcgtcggccccggcggccagcaacggcacgccgaacttctggtcctcgtgagcagtggagatgtactcgtggccgccggcgtggacaccgacggtgacgcgcagcatcacacgggcgcgtttgccgagcttgcgggcgatggcagcaacgcgctccggctcgtcgggctcgtcgatcacgattttggcgaagccctgttcgatggccagcgcgatttcttcatcggacttgttgttgccgtgcagcaccagacgacgtccgggaacgccagcggctagggcgattttcatctcgcccatcgtgcaagtgtccacaaacatgccggcctcggtgaccaatcgcacgacttctttggacaagaacgccttgccggcaaagctcacgtgcgtagtggaggtgttgaatgcttcggcggcagcgcgcacgaagtgcctagcacgtgcgactacttcatcagtgtcgatgagatagagcggcgagccgaactcgtcaagcagcgattcggcggtacgaccatgaaattcgatggagccttcggcattcacagccgtagcggccggccaaattggagaaataggcataatcacatcttttcgggggcggtgacgccgaggaggtcgaggccgttggcgatgacctgctggacggcgtcattgagcttcaggcgggcggcggcacgggccggctccgggttcttggcaatctccaaggccttgcgagcctcgtcgtcgccacgggtttccggatcggtcagggccatcggcaccacgcgctctacgttgtaccacttgtgataggtggcggccagttcttcgaggtaacgggccaccttgtgcggctggcggtcgtcggccgcagtggcgagcacgctcgggaattgggcgagggcggcgagcacttcgccgtcggcctcggtgtcgagcagggccaggtcggcaccctcgtagctgatgccggcagcggctgcgttgcggtccacgttcttggagcgggcgtgcgcgtactgcacgtagtacaccgggttgtcgttggtgtgcgaggcgagcagggccaagtcgatgtcgaagttctggttgtaatcggagcgggccagcgagtagcgggcggcgtccacgccgaccacggagaccaggtcgtcgatggtcacgacgttgccggcgcgcttggacatgcgcacgggcttgccgtccttcatcacgttgaccagctggccgatgagaatctgcatgttcttgccgggctcatcgccgaaggccgcgcacatggccatcatgcggccgatgtagccgtggtggtccgcgccaagcatgtagatggccacgtcggccgagttttcggcgcgatggcgcttgtcccagtagtaggcgatgtcggcggcgaagtaggcgaactcaccattggacttgatgatcacacggtccttgtcgtcgccgtgcttggtggattcaaaccaagtggcgccgtccttgtcgaagatgtcgccgcgggacttgagctcttcgatggcggcgtcgaccttgccgtcggcgtacaggctgttttcatggaaccagacgtcgaagttcacgcggaagtccttcatggacttctgaatctcgtcgaacatcatcggtacggcgcgcttgcggaattcctcgcgcacttcggtatcggcctcgccgagcggttcaccgtcatcgttcaggccctgatcctggtgggccagtgcggtcaggtccacgccgtcggactcggcttcggcctgaacacgggcggcgatctcgttgatgtaggcacccttgtagccgtcgcacggggtttcggtctggtagccggcctcacccaagttattggcctcggcccaagcggcgaccagcgacttggcgaagcggttgatctgctcgccgtggtcgttgaagtagtattcgcgcaccaccttggcgccgttggcctcgagcacgcgggccatggcatcgccgacggcagcccaacgggtgccgccgatgtgaatcggaccggtggggttggcggagacgaactcgagattcagggtctggccgcccagatggtcgttgcggccgtattcgttgaccttgttgagatgcttgtcggcgtcggtcacggcaccggcggcgagtacggtgtccaccacggcggcggccgaggcggagtcaagcgtgatgttgatgaagccggggcctgccacctcgaccttggcaatgccgtcggcttcagcgagcgcggcggcgaacggctcggccagatcgcgcggcttcatgccggccttcttggccagctgcatggcgatgttggaggcccagtcgccatgcgcacggtccttcgggcgcatcacggcgagcttgtcgacgggcggaatcagctcgtcggtcaacgcgccggcctggccggcggcgacgaggttgtgggcaatgctggaaatcagttcacttaaggcttcaggactcattcttctaaggatactgagaacggcgacacttgcgccctggtatgcctatatgctgcccctgctggcgggggcaagcacacagccgaaagataccaagcgaaaaagggtaggcgacaatcgccggaatcgttggaggctcgccgaaaccgctatacataccgtcggtcggtatctatagtaatctgcaacatcaagcacagtagggaggccaccatggcacgtaacgctcaccccgaggtgacgcgcacccgcatcctcgacgccgcacaacggctgttcatggcccagggctatgagcacacctccatccagaacatcgtggacgagctcggcgacctctccaaaggcgcgatctaccatcacttcaaatccaaggaagccatcctcgaagagctcaccaaccgagacaacaatatgcaggacgacttcaacgaatccgtcatgaatcgcactgaccttaccgccctcgaaaagttccgcgtgctatggcggcattcgatgaccaagcaagaccacgtgcagatcatgcgagccgccatgccgatgctgagcgatccggtttcgttcgccgcgaatatgcaggtatggagcaagcatctgcccgaacgcttcctgccgctgatcgaggcgggcgtcaaggatggctccatccccaccgagtatccgcgcgaggccgcagagctgctttcgttgctgccgaattattggctgatgccgtatttctacccggtgaccctgcccgaaatggagcatcgcatccgctgcttggccaccatgctcgacgcgatcggcgtgccgattttcgatgacgagctcatcacggtcgccgcgaagggcatgatgacgttcgcaggggagccggagaaaggctcagaatgaatagcacagtgaaacccgagaatgacatcgccggcaccgccacccaacgcccgctgctgtcccgcgacttcgtgctgctggtcgccggacaaggcatctcgctgttcggcaatgtgatgctgcgattcgcgatgtcgatgtgggtgctggacgaaaccggctcagccaccatcttcgcctcggtgctggccatctccatcgtgccgaccatcctgctctccccgttcggaggcgtgctggccgatcgcgtcaaccgccgcaccatcatggtggcgctcgacgccatctccgccgtgctcgtgctggcgagcgccatcgtcttcgccaccacgggcttccatatcgtagccatcgccaccatgcaggtgctgctcgccgtgctcggcgccttcgaaaccccgaccgtgcaggccgcactcccccagatgttccggcagtacggcccggccaccatgcgccaaggcatggccgtgatcaatcaggtccaacaactaagcagtctgctgccgagcttcctcggcggcgtgctgtatgcgatgttcggcatccgtctcatgatgatcatcgccatcgcaagcttcgccggcgcagccgcgctcgaatgcttcatccgcctcagtgccccggatcgcggcgacgaggagctgcccaccccacttgaagacctcaaggcaggcgtgcgattcctcatcaaggaccggccgaacgtgttcagactgctgttgttcgcggcggcgctcaactttgtgcttatcggctattccggcgtcggcttcccgtacacgattcgtacagtgctcggcttcgacgccactgtctacggcatcgccgacggcctgatcggtgtttccggcgtggcgggcgcattcatcgccggcctgttcgccgccaagctcacgatgcgctggctgccggggctgatggcgacgcttacgctggccatggtcccacagggtattgtgttcctgctgccggtcgacgcatggaccaaactcgtggtgctgatcgtattcacctgcggcacgatggtcgccagttgcttcacgaatctcatcgccgtgcccgccatccagctcagtacgcccgaggcaatggccggcaaagtgatgtccatggccgcggccgtgagcatgtgtgcccagccgctcggccagatggtgtacggctgggcctacgaccaaatgccggtcgccatcgtgctgttcatcaccaccgccctgttcgccgtgctcaccgtgctgatggttccgctcgccaagcagttcgaggactgacgatcggcgcgcacgccacatcctgccgcccggccataattgaatcaccgcacgaaaaggcacgaaaaggcacgaaaaggcacgaaagaggtacctatggccacgctcaacccccaatcattggtcacgttgtggcaaatcgaacagtatggttcgttctccgccacggccaaggccacgggttggtcgcagccggccatcagccagcagatcaaaaagctggaggcacagtgcggttcgactctggtgcaacgcacctcgcatggcgtggaactcaccgccaccggttcgatgctcgcccgccacggcgaggccatcgccgatcggctggagcgggcggcccgtgaagtcgaggattatcggcatcatcggtttgatcacctgcatttggtggccccaccgtcaatctgctctactatcgcggcccgtaccgtggtcaagctcagtatgttcacggacatcgagctgagcctgattcagatggagccgccggaggcgatcggtctgatttcccaaggcaaggccgataccgccgccgtgttccgctacagcagcatcccgaacttcctgcacatcggcgacgacctgaccttccattcgctgggttacgatccgatgcgactgctggtgcgccgctccagcggcatcgccaaacgattcgaggagaccggcgaacctgtgccgctgtccgccgccaaagacgagcattggatcgccggctgccccacctgccgcgcaaatttggtgaaactggccgcccgtgccggattcaagccggatatccgccactgcacggatgattactgggccacgcagaacctggtcgaggttggtatgggcgtctcgctggtgccggcgctcgatacgcatatcaacttgcagggcgatctggtggcctgtcccattgccgacgattttgcggcgcgcgaggtcggcatcgtgactcgtgccggcgaccatcgccccgcgcttggttcattgctcgaggagctcgagcgcacgtcactcaaatatttgagtgccaagtagtcgcacagcgataagcaagcttgcgagcgccatcacgatttcggggagccagaccgttgagcggcccttctgcaccgggaacaatggcatgttatgagcatgaacaacattccccagtcaacgactttgagcaacgcaaccgccggcacctcttgctttgatgccaatcacatcgacgtgacgaccatcgaggatctggagcaggtcggttcggataaatggacccgctaccccggctgcatcggcgcattcatcgccgagatggattacggtctggcaccatgcgtggccgaagccatcgaagaggccaccgaacgtggcgcgctcggctacattcccgacccgtggaagaaggaggtcgcccgctcgtgcgccgcatggcagcgccgctacggctgggaggtggatccgacgtgcatccgcccggtgccggacgtgctggaggcgttcgaagtgttcctgcgcgagatcgtgcgcgccggcaactccatcgtggtaccgactccggcctatatgccgttcctgagcgtgccgcgtctgtatggcgtggaggtccttgagattccgatgctgtgcgcgggcgccggcgagagcagcgggcgcaatgatgaatggctgttcgatttcgacgccattgagcaggcgttcgcgaacggctgccatgccttcgtgctgtgcaacccgcacaacccgatcggcaaggtattgacgcgcgaagaaatgctgcgattgtccgatctggccgccaagtacaacgtgcgtatattctccgatgagattcacgcgccgttcgtctaccaaggccacacgcatgtgccattcgcctcaatcaaccggcagacggccatgcaggctttcacctccacttcagcctcgaagtcgttcaacattcccggcaccaagtgcgcgcaggtgattctcaccaatccggacgatctggaactatggatgaggaacgcggaatggtccgagcaccagacggccaccatcggtgccatagccaccacagcggcctatgacggcggcgcggcatggttcgagggcgtgatggcatatatcgagcgcaatatcgcgctggtcaacgagcagatgcgcacgagattcgccaaggtgcgctatgtggagccgcagggcacgtatatcgcgtggctggatttctcgccactgggcatcgatgacccggccaactatttcttcaagaaggccaacgtggcgttgacggacggccgtgaatgcggcgaggtcgggcgcggatgcgtacgcatgaacttcgccatgccctacccgctactggaggaatgcttcgaccgcatggccgccgcgctcgaggcggacgggctgttgtagaaaattgtggctcccctcagagaggggagccgaggaacggccgaattaatcgaagtcggcacccaacgcttcgagtttgccgcggaagtcggcgtagcctcggtcgatcaggctgatgccgtgcacgtccgaggggcctgacgcggccagggccgcgatcagatggctgaacccaccacgcaggtccggcacgtcgatgtcgcgtccggtcagcggggtcggtccgaagatcacggcggaatgcttgtagttgcgctgccggaaacggcacggcagcgagcccaggcactcgcggtacaactggatggtggcacccatctcgaccagcggcttggtgaagccgaaacggttctcgtacacggtctcgtgcacgatcgacaggccgttggcctgggtcagggccaccacgagcggctgctgccagtcggtcatgaacccgggatgcacgtccgtctcgatcgccacgggcttcaagtccccgcccggatgccagaaacgaatgcccttgtccgtcacctcgaatttgccgcccaccttgcggaacacgttgaggaacgtgatcatctccggctgggtggcacccttgacgaaaatgtcaccgtgcgtggcgagcgcggcggacgcccaggacgccgcctcgatgcgatccgtcagcgacgtgtgcgtgtacccctgcagttccttgacaccctcgatgcggaaggtgcgatcaacgtccacagaaatgattgcacccatcttctgcagcacgcacaccagatccatgatctccggctcagtggccgcgcccgacagttcggtcttgccctcggccagcacggccgccagtaaagtctgctcggtggcgcccaccgacgggtagggcaggtggatcttcgcgccgtgcaggccgttgggcgcggtgatgtggatgccgtccttgtgttccttgtccaccgtggcgcccagcttgcgcagcgtctccagatggaagtcaatcggacgtccgccaatcgcgcagccgcccaacgcgggaatgaacgcttcacccaaacggtgcacgagcgggccggagaacaggatcgggatgcgcgacgaaccggacagtgtatccacgtcggccacatcggccagctgcacacgcgaggcgtcgatggtcacaatgccgttcgcaccgtccacatccacgtccacgccgtgcagacgtagcaaatcggacaccacatgcacgtcacgaatctccggcacgttcttcagcaccgacttgcccggtgccagcaacgcggcgaccatcgccttgctcacgaagttcttcgcgccacgcaccttgatcgtgccattcaaaggcttgccgccctcgacatgcaacacgtcatccggattctcagccacgccactctcctcaatcaatcaagattcaaaaaatgctaccgtccagtttgccataagccatgtgccgactccgtgaaatgcaccccagccgaactttgatcaccgtgcacaacggatcccataccccccgtcgaatcaaaccgataacgtgatctttctcacatttgccgccacggcgttctccatacttctacgctacgattcagggcaatggcatcagacgccatggccacaagcaaaggagcattcatgaccacagtcgccgtcatcggctgcacgcacgccggcacgttcgccaccacctcgattctcgccgagcaccccgattggaccgtccatgttttcgagcgcaacggtacgctgtccttcctctcctgcggcatcgccctgtgggtgggcgaccacgtatccgacccgaagaaaatgttctactcctcccctgccgctctggccgaagccggcgcgaccatgcatatgcgcaccgacgtgacgtccgtggacctcgacgccagaaccctcacctaccgcgcgctggacgaggccggagaccccgccgaacagaccctcgctttcgacaaactggtcgtgaccaccggctcgcgcccggtcatcccaccgatccccggcatcgacagcccgcatgtgctgctgtgcaagaactgggatcacgccatcgccatcaaggaaaaggcgaaaaccgccaagtcggcagtggtgatcgggtcgggctatatcggcgcggaaatcgccgagcagttcagcgtcaccggcgtcaagaccacgctggtcgacggccttgatcgcccgctggccaataatttcgataagaccatcaccgatcaggtggcggccgcgttcgaggagcacggcgtcacgctcgcgctcggccagaaggtggtcgagttccgcgacaatgacgacgacaccgtcactgtggtcaccgaaaagggcgagtacacggccgaaatggcgattctggccgtcggcttcctgccgaacaccgacctgctcaagggcaaggtggacatgctgccgaacggcgcgatcgtggtcgacgactacatgcaggcgtccgcgccgggcgtgtacgccgccggcgactccgccaccgtgttctacaaccccaccggccagcacgattacattccgctggccaccaacgcggtgcgccagggcctgctggtgggccgcaacatcgagacgccgaccgtgaagtacatgggcacgcaggccacgtccgccgtgcagctgtacgatctctcgctcgccgcctccggcctgacccgcgccggtgccgaacgccgcgggctcacggtccgcgagacctcgctcaccgaggattatcgcccggacttcatgctcaccaccaccccagtcacgtcgattctgacctgggacccggaaacccgcaaggtcaagggcggccagttctgttccaaggccgatatctccggcgcggcaaacgtgatttccatggcgattcaggccggcttcaccatcgaccagctcgccaacgtggacttcctgttccagccgaacttcgacaagccggtctactacgtcggcgccgtggccatgaaggcggcggccgagtaagacggctgtacccaccgcaaaaaagaaaccccggcgtgatgggcgccggggagagaaaggagagaagaagaaagaggttaagttatgcagcttgttcggccgtgattacatataacaacaccagtttcaatgcaacgtgggcactggctgggaattgtctgggaatcacggcccgtacaggctgtttcttgttttggagccgatttaccggctcgccttgatcttgtgggccagctcggcgtcccacatcgcgccggttgcggacatcaccgaatccgcgccggcgtttctgtatgcctgatagtcggccggcgaaaccacgccgcccacgccattgatcttgaaatcaagaccgagcttctcgcggatcgcggccagacgggcgaccatgtcgaggccggcaccacgaatcgcattgccacacacgccggagcgatcacggcctgcaccgggcagggcctgattgccattggcatcgaccagtttggcggaaatcgtattgatggtgctgaatccctgcacagtgccgtggcccacggtggaacgcaccatgagttcaaggtcgccgtcgctggggatgtaggcgagcttgaccatcagcgggatgtcgccgatctcctgcttcacggcctcggtgatgcggcccacgagcagcggattgtggcatagcaggcggttgtggccctcgttggggcagctggtgttcatcaccatgagcttggcaccggtttctttgaccagacgggcggtggtggcatggtcggcgatgtattcctcctcgctcatgccctccacacgcgagccttggaagctcgggaccagcacttgaccgggaccggcggcctcgatggcggcgcgcatgtccggctgccagacgtcagggctctgcgagggcacaccgaagctgttggagatggaaatcggctgttcatagttggtgtcggccagcacgccttcgtccagttcggcgctgcccggcgtcagtgaaccgtccgccgacttggggtgtacggcgagcacgttcgggaacgggttgcagccccaggcgcgcgaacgcacggttttgtaggtcgccagatcgaaacccatgtggaaagcggccgtggtgaaacggctgttgagcagcgggcctgcgggaatgccgaaaggcagattgaccggctggcccaaaaaggtggccaaggcaccctcggaggcaccctcgctggtggttccggcggcatcggcaccgttgccatccttcagcgcctcggcgaacgcgccgaacggcccttgctcatagttgtcttcgtaactgcggctgacatcgtaaaacggctcaaaatcactcatgcttcaacgataagccaacctgcatgcgcacacgcacactcaacccatcatcgcgccgacaaacgaaataatggcgaaagcggcattggctaccacaaagatgatgaacgtcggagctgcccagccaaagtacgtgtctggaatactacgattcgtacggtgatattggcgcaaacttaaatagtgcaaacacaccctagaagagataggagggaatggcactttctcgcgttgttggtggaagtatttgggatgctaagcgagttgccgcattggaaccagacgattgcgtgaagtgaccctatacgtaaaaggtctcactggcgagagccagtgagacctttgtctgatgcgatgcgagcgacccaataatctcaatcagacacagagccaacggccctgggcctgcaattatggactcgcctttcggcgaggctcaatgctggcctcgctgctgtcgcagctcggcacagggcctgctgaaagcccaccgggctttcagcaggccgatcgcggctaaataatgccgcgatcggccaacggccctgtccagtctgcgtcctcaggctcgcgggcggactcgattctttcttcggcccagtgtttggcggggatggtcttgggcttgaaggggaacttttcggcgcgcatcttttcgtaggcggcgatgtcgtcctcgtgctgcagcgtcagatcgatatcgtcgtagccgttcatcagacgccaacgcacgtaatcgttgacctcgaacggcagggtcacgtcgccgcaagtgacagtgcgggtctccagcgagacagtcatctcacgaccaggctcttcctccagtagcttccacaggagttcgacggactcctgcggcataatcgcggccagcacgccgttcttggcggtgttgccgtagaagatgtcggcgaagctcggcgcgatgaccacgcggaaaccgtaatcgtgcagcgcccacacggcgtgctcgcgggaggagccgatgccgaattcggggccggcgaccagaatctggcccttaccggcgtattccggcttgttgagcacgaagttcgggtctcggcgccatgcgtagaacagggcgtcatcgaagccggacttggtcacgcgcttcaagaacacagcgggaatgatctggtcggtatcgacgttggagcggcgcagcggcacgcccacgccggtcagtgtggtgagtttttccataacaattttcctttcggggatctctcccccagtcagtcttcgactgacagcccctcgtcagagggggctcacgtgtattgactcagagatcggcgggagacgagattgtgccgcggatggcggtggcggcggctacggccggcgacgccagatgcgtgcgcgagcccttgccttggcggccctcgaagttacggttcgaagtggaaatcgagcgctcgttcggtaccagcttgtcggggttcatgcccaggcacatcgagcagccggcgttacgccattcggcaccaaagtccttgaacaccttatcgaggccttccttctccgcctgcagacgcacgcgggaggaggccggcaccacgagcacgcggtgaatgttctcggccttgtggtgacccttcatgatcgcggcggcctggcgcaaatcgtcgatacgaccgttggtgcacgaaccaatgaacacggtgtccacggcgatgtccttgatcggcatgcctggcttcaaacccatgtatgtaatcgcacgttcggcggcggcacgcttggtggcgtcggcgatcttgtccggctccggcacggaggcggtgatcggcagaccttggccggggttggtgccccacgtcacatatggaccaagcttggtggcgtcaatatccaccaccttgtcgaatacggcatcgtcatcggtcttcagcgtcttccagtacgccacggcctgatcccacagctcgccttccggcgcgtgcggacggcccttcaggtactcgaacgtggtctcgtccggcgcgatcatgccggcacgcgcaccggcctcgatggacatgttgcacacggtcatgcgctcgtccatggtgaggttgcgaatcgcctcaccacggtattcgatcacgtaaccctggccgccgccggtgccgatcttggcgatgatcgccagaatgatgtccttggccgtcgcgtccgcgggcagcttgccgttgacgttgacggccatggtcttgaacggcttcagagacagcgtctgtgtggccatcacgtgttcgacttcggaagtgccgatgccgaacgccagcgcgccgaacgcgccgtgcgtcgacgtatgcgaatcaccgcacacgatggtcatgcccggctgggtcaggcccagaatcggggcgaacgcgtggacgatgccctgatcggcgtcgcccagcgggtgcaggcgcacgccgaactccttgcagttcttctccaaagtcgtcaactgcaacgcgctcgtctcatccgggttcgggcgatcgatatcaacggtcggcgtgttgtgatcctcggtggcaatgagctgatccacgtgacgcggcttgcggccggccaagcgcaggccctcaaacgcctgcgggctggtgacctcatgcatgagcatcagatcgatgtacagcaaatcaggggctccgtcgctgcccttgcgcaccagatgatcggcccagaccttctcggccagtgtcgttcccatagtgattcctccaaaaaattccgcgcgaggtattgtgttcgcgccttgttcgtggtattagcctatgtgcttgcgatgggcccggccatgagcatgccggatattgagatacggtcaaatgatggcctcaatatgactcggatacgactcgaacatgacctagtcatgactcggttccgctccagacatgtctcttcggcatccacgaacgccctttcaacttcatggccaccctgtgagacacttccccaatttgctatttcactatgtgagatggcataatcgcccttattatgactgattcccaagaagagccattgaacaacagcttgaccgagtccgagccggttgaagacaccaccgccaaggacgatggggaaatccattccggcgttggcgtccttgataaaactgtaaagattcttgacgcactggaatccggcccgtctacgctgggccagcttgtggccgccaccggtctcgctcgaccgaccgcacatcgtttggctattgcactggaacgccaccgtttcgtactgcgcgaccagcatggccgattcgtactcggctcccgtttcgccgaacttgccgccgcagcaggcgaggatcgtctgctgaccgccgccggcccgatcctgcagaccctgctcgatcgcactggcgagtctgcgcagatttaccgccgccaaggcgatcagcgcgtgtgcatcgccgctgtggaacgcacctccggcctacgtgattccattccggtgggtgccatgctgtcgatggaagccggttccgccgcccagattcttctggcttgggaggattccgaccgtctgcaccagggattgcgccacgccaagttcaccgccaccaagctggccgccgtacgcaagcgcggctggtccgagtccgtgaacgaacgcgaagagggcgtgtgctcgatttccgccccgatccgcaacgcctccggccaggtcatcgccgccatctcgatttccggcccgaccggccgcatgggtgccgcccccggacgccgctatgcgccgctggtgatggccgccggcaagtacctcaccgaggcactggtcaaagccgttcgctgaaacataccagtcaatccaaccgatagcccaaccggcagaaatcccgcgtcacaacgaaagagacgcgggatttctgccactaatcgtccaacacagcggaaggccaccgaaacctcgaatacttcgcgccgctttccgcctctatcaggaacagttacctgaataaaccgggttacctgaataaaccggacagttgactccatagcgacggcttgcgcagcaaatcatcgccctcgccctcgccaggcgcggtctggttcaccgcataggtataggcgcgtttggaactgggcttgcccaccagttcgccaaactccagcaattgcgtacgcggctcgtaagggtgacggatatcaaattcgatcaatcgcgtggcgcgtttggccggagccggtccgtacgtattgaatccgcaggttggcgtagcgataagcaacagaccctcatgttcgccgacgaaaccgttgcgatgatcatgaccagctacgacgccgaaatacccctcgcgcagcaattcgaattcgcctgacgtatcagggcaggatatgccttctcccaaatatccgccgtgctgggtttgcaattcgtccagcacgtagtaggtatcggcgtgcgaacgatagccctgcatggcaaacgccgcgttggccgccaccggcttcagcacgttgtaatactcgggcatcggcatgtgctggaacaccattgatttcgcatcgatacggtcgggcacggcgttcaggaaggcgagcgctgcgggcgatggtgcgccgaagccgccgccatgcacgtaatcgccggagtcaagaatgaccagacccagcacattgcgcgtatggtcaacgtccataaccggcagcgcgaaggtgcctggttcaccggaacccactgcggatgcgggggaagacacagcagaaggcacaacagcatcggcaccagcatcgtcaacgacgcccaacgtatcagccttcgcggtaatccccgcaccggagccagtggcaccagacggcgtctgcacagcgccacccgctccacaggtatatgcaatctggttcggcaaggtctcactcggcggattgacacaaccggggaactcacgatagataccgtccagttccgcattgcttagcccgcattggaaatcatggttgccatacgtcacagcccacggaatgccgcgcgccgccaacggctcagtgaactggccaatggccttgcgcaccagcgctcgggtatggttcagcgcggattcggcaataggttcgtcacaccagcgacgtttacggaatgaatcggcgaacgccggatcgtagccggcgatctggttgccggagaaaatcaccagatcaggccgtgtggcatcaaggctggcctcaatcagggtgatggtgtctttggagactttcggcccatcctgaatgtcggcaatctgcagcacgcggaacttgccggaatagtggaattgcagtcgtccgagacgcgcagagatagagaccggacggccgtcttcggcatcggccggcttgatacgaggtttcgacgacatcccctctggcgtacgctgtgtttccgtcatgccctccactgtacacacaaacgaaaaggcccgccggagcgggccttttctacaagttcaactactggagcagaatctctgcacaacatcatcgttgtaacggtaagtctttccaatgcccgtccaacgtaacagtcctcgtgaccatacactatttgtgggctctgctctgttcagttgttcttgtacctcataatctattcatcactcccgtttctcgcaacctgcagagagtcgttgtgcgttttttatcacaactgttcaatcgcactttctggctatcggaaaacgagctgaaccgttcacatcgaacccgtccgatgttcgatttcgttcgtttcaccgccgctcacggcgtgtcgcgagcgacgctagcacactcaaaaccaaccaacaccgaactaacatgaacacccgttgaattctggcgcgttcagtcgttttccggccacgccaaagcttacgatataagctatggcacagatatttgacgcaccctcgaaggcaattctgcgcagccaaatcgcagagcatattgccgaaaacgacaacaacgaccgccgcgtcgatcaggaaggcgaggcaccgctgcccaaggaccgtttcttcgaccgcgagctcagctggctcaagttcaaccagcgcgtgctcgaatgtgcggagaacgaagacatgcccctgctcgagcgcgccaacttcgccgcgatcttcgcctcgaaccttgacgagttcttcatggtccgcgtcgccggcctgaagcgccgtatcgactcgggcatcgccgtgccgtctgccgccggcctgagcccgcgtcagcagctgcgcgcaatcagcgagaccgcacaccgtctgcaagacgagcacgcacattacacgatcgacaccattctgccggaattggagaaggagcgcatcgtcctgctgacgtgggacaagctcacatcctccgagcaggagcgcctctcgcgctactaccgccagcaggtgttcccggtcctgacgccgctcgccgtggatccggcccacccgttcccctacatttccggcggttccatcaacctggccgtgattgtggagaacccggcctccggcaagtcgcacttcgcccgcgtcaagatcccgggcaacctgccgcgcctggtgccggtggacgacatgaccgatgaggagtccaaggacgagcgttacggcttcatcgccatggaaaagctcatcgccgcgcatctggaatccctgttcccgggcatgatcatcaaggaggcccgctccttccgcgtgactcgtaacgaggacatcgacgtggaagaggatgacgccgagaacctgctcaacgccatggagaaggagctgctgcgccgccgcttcggaccgccgatccgcctggagatcacggacaccacgagccccttcctctcccagctgctcgccgaccagctcggcgtgagccaggacgaggtataccgtctgcccagcccgctggacctgaccgtgctctttgagctcggcagcgtggaccgcccggacctgaagaaccgtccgttcgtgccgaccacgaaccgtcagatcgccgaggtcgagtcctcccgcgcacaggatattttcgctgccatccgcgagcgcgacatcctgctgcatcacccctatgactccttctccacttccgtgcaggccttccttgcgcaggccgccgcggacccgaaggtgctggccatcaagcagaccctgtaccgcaccagctccaactcgccgatcatcgacgccctgatcgacgccgctcatgccggcaagcaggtgctggctttggtggaaatcaaggctcgtttcgacgaggacgccaacatcgcgtgggcccgcaagctcgaacgcgccggcgtgcacgtggtgtacggcatcgtgggcttgaagacccactgcaagctcatcgaggtcgtgcgtcaggaagcggacggtctgcgccgctactgccacgtaggcaccggcaactacaacccgaagaccgcgcgactgtacaccgatctgggtctgctgacctgcgacccggtggtcggccaggatctgactcgtctgttcaaccagctctccggttacgcgccaaagtccagcttccaccgtctgctggtggccccgcgcaccgtgcgcaccggtctaatccagcgcatccgccgcgaggaggacgccgcccgcgctggcaaggaggcctggatcaagatcaaggtcaactccatcgtggacgagaagaccatcgacgccttgtaccgtgcctctcaggccggcgtgaagatcgacatcgtcgaacgcggcatctgcgctctgaagcccggcgttcccggcctgtccgagaacatccgcgtgcgttcgattctcggccgcttcctggagcactcccgcatctacgccttctgcaacgcggacggcccgcagatcggcgagggtccggcttccggcccggaggtctacatcggttcggctgacctcatgcaccgtaaccttgaccgccgtgtggaggctctggtgcgtgtcaccgccccggagcaggtcgacgggctcatcaagtacgtggacctgcagatggccgactccaccatgagctggcacatgcagcccgacggcacgtatgtgctgcacaccaaggacgacgagggccgcccgctggtcgacagtcaggaatatctgattcgcaagcaccagcgccgccccaattcgcacaactgatttcattcgatgctccctgtcagcacgagctgactgagggtggttacgatgcccggctcctctttcgagaggatgccgggcatcgttgttcagcgcgcaaaaactacgtagcagcggtccaacgtgacctacaatacaagagatgggtacgaacagtatgagacgaatcgtggaagccgccggcggtattctgtaccggtggaaggatgatgccgagccgacgcaggcatcgtctccatcagcgaaatccaatattgccaccgatggcaccatcatcgcgaataccgcggattctgacggcaaggccacggcagcacacggcgcatcggacgcggctcccaccccggacccgacgcaggccgacagcccggccgcggtggacaacgtactcaaccgcatcgaactgtgcgtcgtgcatcgcccgaaatacgacgactggagctggccgaaaggcaaggtcgacccgaacgaatcgcaccggcatgccgccgtacgcgagatcggcgaggaatcgggcctgtccgtggaacttggcccctatctgggcgacatcgagtacccgctgtccgaagaaggcagcaaacagcgccataccaaggatcggtcggcggataccaagcatatccagttctggatggccacgccgatcagcgccatcgacaacctgcggcgtacccatgcgtttggcccggtgcatcgggcggacatcggcgaaatcgacgaagttttgtggctgacgccggccgaggcccgcaagaagctcagccattccaccgataaggacatcctcgcgctattcgttgatcgggtgcaggagggcgcgcttgacgccgtgccggtgattatcgtgcgccacggcaaagcggaagcgcgcaagctgtggaagggttcggacgcgaaccgtccgatcacgccgcgcggcgcggctgcggcatacgcgctgaaccgcgagctggcgtgtttcaatccgacccgactggccacgtcgccttgggtgcgctgccaggagacgttggagatgttcgcgtggcagaccggacgagacatggttcatctcgatccgctcaccgaagatgcatacgccgctgcgccggacaccgcatgggagtgtctactcagcgaaatcgagttcgcacttgagcgccgtcagcccatagcgatatgcatgcaccggccggtgattggtggtatgttcggacacctgcgcagcatgtgcgttgcgccgtctctgagcaaacgcctgatcgccaagacaccgttcatgccgaccggcacggcggtggcgctgttcgtcactccgacgcctcatggtcccaaaatcatcgatattcagaaggttcaaccgcttgtctactagacccgcatttcctgattcatccaactcctcggccgctgccgctgcagctcatgccgcgcacaatggtgccgccggcagtctgggcccgggcttcggctcgttgcgtgcggccggagcggcattcggacctgctcgcatgggttcttcacgcccctcgcgcccggctcagctcgacccggctgtggccgatggattggccggtggcatggacccgcaggcgttgagcgagatgagtcatctgtctgctgccgcattgctggatcgtgtgcgccatagcgaagacccggcggttgttgagcgggtgctcacgttggtggagacggtcggcgtggatgaaatcgccgaactatggagcgataccgagccggattcgctgcctggtgtgctgtggcgactgtatatgttgcgtacgtggatgcgatcgaatcgcgactcgatcgcgcatctgtggcgcttgggtgagccggtggccactaccgcctccgccatcgccggcgtggatcaggctcccagtgaagatgacatcgtgcgattggccgattcgattctctccggtgcttttgtgggcgattttgccgtggcgcttgagcgtgcggcggcgtttaccgatgtggtggcgttgggcttgcgcgtggaggcgcggcgcatggtgacccgggccgaggccaacggcggcttctcctcggatgccgatgagaaggccgtgcgcaccaaagccacccgccttatgcacaccgccggcagcctcatggccaccgccaaggatttccaacacggtgccaacctctggcgtcgcggacggttggagtaaccccgctccaggctccctctgatgagggagctgtcacgggcgatgcccatgactgagggagaaacccaccgaccgcaccccaacaatcagctaccagccaacaccacacctcccccggcgcggcgagccccatcgcaagctatactaagtatccgcgtcggaccgtgcttaagccccgggctccattttttgccgccgcgagcggcccttgcgccgacaggcgctttcgcggttcggcgcttcttttcttttacccgattcacgccccgaacgttgcgatgggcacgaccagtatgccgtcattgcggcgataggccttcccacctcggccggtaaggaacatcatgaactctggttcgcgaacttgggccatggggttgccacagattttgtcgcggaaggatttgagcttatccgcattgtcatcgttcaccttaaggtcactgagttttatttcgatagcaccccacctgccgtcagacaactcgataatgacatcaacttcaagccccttgtcatcgcggtagtaggcgatgcgattgttcgcgcccggcatggccgacagatatacattcaaatcacgaatgcacagcgtttcaaacagatcgccgagcgtctgtgtatcgcgcatcagagtattcggcgcggcacctaaaaccgcagcagacaacgaaggatccacgaaatatcgcttgggcttggttcgcacacgactctttgcgcggagtggcggctcccaaccctccaaatccgtcagaaggtacaagtccttgaacatttccaaatagctcttcaccgtctgcgtatccggctcacgccgctcatcgccatatgccatatccgcagccagcgtcgcatattttggtgcctgcgagatgttcacggcaagagctcgcatcaaagctcgtgcagtttcaggattcttcttcatcttcggcacgctgatatccagcacacttgcgatatattcgcccgggatttccaaggcgaattcatcgtctagctcaagattcgcgggccatccgccacggcaacaccatctggcgatgtcttcgatactcgtattgcattcggcaggctcgaatttcccctcgaacaaatcggataggctgaccgcgcccgtggattctccggattcagccaagctcatgggccacatgcgcagacgagcaatgcgaccagtgccgctgtgatgaatggcgtcacgatcctttggaatagccgaacctgtaagaatcagctgccccttgcggttcgcattgtcatctatatggcgacgagcggcatcccaaatttgcggtacatcttgccattcgtccaccagatggggctcctcccccatcagcaccaatgcaggatcggtttgggcggccgcgaaaactgccacatcatccagacgatcaacgcttcgagaccgggagagcgcggtccatgtcttgccgcaccatttcggcccaacgatttccactgcaccgaacgccttgagcagtttacttaatctgctatctaccacgcgtgaacgataatcaggcctggtcaaggtaccatcgcgaccactcaaatcgttcatattgcagcctttcccagttctatcgttctaacaatatagattttacaccagtttcattcccgattttacacctatctcattcccggttttacaccagtttcattccctgttttacaccgtgttgttttttacgctttaccctctcagaggtatcagaggcagatctcggcacggacagggcattgtcctgctgcaactggcctatcgcagcaaaaagtcgaatcacccacaaatccaatccgataagcaagccgcgccattaccaattcggcaggtcggcaaacttggactaggctgggaatcatggaactccatgttttgaatcatccgctggtcgagcacaagctcaccgtgctgcgcgacaagaacaccccctcctccaccttccgcgagctcgtctccgaactcgtgatgcttgaggcctacgaggccacccgcaacctgtccgtggtggccgcgccgatcgagacgccggtcgccccgatgaccggcaagaagctcgcctccccgcgcccgatcatcgtgccggtgctgcgcgctggcttgggcatgctcgacggcatgacccgcctgattccgactgctgaagtcggcttcctgggcatgaagcgcgacgaggagcaccccacccagcaggtgacgtacgcgaaccgtctgcccgaggacctgtccggccgccagtgcttcctcatcgacccgatgctcgccaccggcggaacgctggtcgccgccacgcactacctggccgagcgcggcgccaaggacgtgaccgcgatcaacatcatcgcggcccccgaaggcatcaagtacgtcgaggagcacatcgacccgtccatcgacttcaaggtcgtggtgtgcgcggtcgacgaacgtcttaacgacaagtgctacatcgtgccgggactcggcgacgccggtgaccgtctctatggcgtaattgactgatttccctggctcccctccccgaggggagccaacataacggaacatctatgcaaatcgacattattgcgccggggcgcgtgaaggagcgttaccttcgcgacgccattgacgagtattccaagcgactttcgcgctactgcaagctcaacatcattgaagtggcagatgagaaaacgcctgaccatgcctccgaaggcgttgaccgacagatcaaggccagagaaggcgaacgcatcgccaagcatctgaaggacggcgcgtttgttattgcccttgccatcaatggcaagcagctgtccagtgaagaattggccgccaaaatcaacgaccttggattgcgtggcaccagccatattcagctggtcatcggcggttcaatcggccttgacgacgcgattctgcgtcgtgctgattttctgctgagtttctcgaagatgacgttcccgcatcagcttatgcgcgtgattctgctggagcagatctatcgcgcttataaaatcaacgctggcgagccgtatcacaagtaaaacgccatacctcatggggcgggaaatcccccatggggcggtaattgccccatgaggcggcaaaatcctcatggggcggtatgccaaaatggcttaattccgcggtttcacatattcttcaaaccgccccatgggcaagttaccgcccgatgagcctgtaaccaccccatgggcgcatcaataacgccctcaacctcacactgcgtcggggacgaacgcttcgaagatgtggcggtcgaagtagggggcgcactgggcgagttcatcgctgctgcgcacggtccatgaaaccggcatcgcacccatcgaacgagcgagcttgacttgcggcgaagcgccaccggtccagtcataagccacgaaatcaggacgagacagccagtcgaacgccagtaagccggcggcccattcagccgcaccattcttgctcagcttcgccggccagctcagctgaccgcggcacacctcagggtgatgctccttgtaccaattcaccgcgcccgggtggaaggattcgatcacgtacgggccgtcatacgcctcaagcaaggcgtggcccttttccatgagctcttcgctacgctcatcccaagccctgttgttgctgaacttgtattccacaatcagcggagcctggccggccaccacgtccagcacatcggagaacagcggcacatgctggtagtaccccttcggcgcggcggacggcgtgaccaccagcggcgggttcgcgtcggcacccggcaacggttcggccttcaaatcgcctgactcgccgttcgggaagagcggaatacgggcgagttcgtcgtaagtcaggtcttcgatgcggcgcggatcgccggccacgcgcaacaaatcggcgtcatggaccacgaccacttggccgtcgagcgtaagctgcacgtcgagttcgatgccatagccagcctcgcaggcggcggcgaacgcggccagcgagttttcgggagcaatcggaccggtcatatccgcactgccgtagccggccttgacagccatgcgacgggcaagcgacacataatcatcgttttcggcgatggatcgctcagtggtatcggcttgggcgctaaccggattatccccactataatcagcgatatcggtatagccgaccaaaccagaacccgcatcatgcaagccacgatgggcataccatacctccggaatggagggcacgaaattacgacgcttgtcattgaacgtgcgcggggccacggcccacacggcagcaccggcggcggccacgcctgccagcgccacgtttctccagagcttcgacgacattggaatccttcctgttgggctgcctctagcctaacgcttctgccagccattgtggagtggttggaccatccggtttcagcgcgcggtccaggtggttggcgcgcagtggctcccagctgaaatctgccagcagatcggcgggtttgcaaggaattggagtgggttgcagacgcagcagccaggcgcagtatccgatgatttgctcgggggttacgttgcgggcgcgcaaggctcccatatccagcgaacgttcgcgcttggctaaacgccggccggccgcattgtcgataagcggcaggtgcgcatactcggggtgctcggcgagaggcttttccgtgttgccgcattccggctcaaagccgccagccaacagacactggcgaatccacatttgcagcgcggtggagcgcagcagatcacggccgcgcacgatatcatcaacacccatatcgaggtcatccacgaccacgaccagttgatagccgaacagtccatcggctcggcgaatcacggaatcgcctacctcgcgggccaaatcgtagtgctgtggactatagacacggtcgttaaagcatgcgacaccatcaacgattccggcatcgccctgctgttccggcggcacggctcccgacagcgcagcggaatcgtcaggcactgtacgttgcttttctcccgctgccgattccggcatggcgatacggatggaatgctggtcgccgcgaaccaaacgggcacggacctcgtcgggatggtcgtgcagcaggcggcggcacgtgccggggtacaccatgaagccgtcgccctcgttgggggccgaggcggcgcgaatgtcggcacgcgagcagaaacaggggtacagcacaccttgcgagcgcaggcattcgagagcgtattcgtatcgttcagtgcgctgggattggaacatcggttcgccatcccagtcgaggccgagccaatgcaggtcatccatcatgagctggtccgcaccggcgaccacacgcggcttgtccacgtcctcgatacgcatcagcatgcggtcgccacgcgagcgggccgaaagccatgcacccaacatggcgtacacgttgccgatatgcatgcgccccgacggcgtcggcgcgaatcgtccagtcactggccctcctcgtatgaagttcagcaccatggtagcgaaaaggctctcctcctcagaggagagccaatatagtgaagctcgccagcccgaactcccctcagtcagcttcgctgacagctttgctcagagaggggagccagtgattgtcacttgtcttcggtgacgttgtccacgctcacgtccggattgtcggagacaatctggtcgctcgcccaagcggagagctccagatgttcgccgccggtctggtcgacgagcacggtgtcaccgtcgtggaccttgccggccagcagcatacgggccagctggtcgcccacttcggtctgtaccaggcggcgcagcggacgagcgccataagccgggtcgtaaccggtgttggccagccattcgcgagccgagtcggtgacgtccagcgtgatgcggcgatcggtcagacgctgggacacgccagccacctggatatccacgatgccgccaagctcctcgcgcgtaagcgggtggaacatgacgatgtcgtccagacggttcaggaactccggcttgaagttcatgtggacggcgtccatcacggcctttttcttggcgtcggcgtccatgtcctcgttcacgaggaactgcgagccgaggttagaggtcataatcaggatcgtgttcttgaagtccacggtccttccctggccatcggtcaggcgaccatcgtcaagtacctgcagcagcacgtcgaagatctccgggttggccttctcgacctcgtcgaacagcaccacggaatacgggcgacggcgcacggcctcggtcagctggccgccctgctcgtagcccacgtagcccggcgccgcgccaatcaggcgcgagaccgaagccttctccatgtattcggacatgtcgatgcggaccatggccttctcgtcgtcgaacaggaagtcggcgagcgccttggccagttcggtcttgcccacaccggtggggccgaggaacaggaacgatccggtcggacggttcgggtcggagatgccggcacgcgaacggcgcaccgcgtcggacacggcggcgatggcttccttctggccgatcacacgcttgccgaggtagtcctccatgtgcagcagcttctcgttttcgccctgcatcaggcggccgacgggaatgccggtccagtcggagacgatctcagccaccgagtcggcgtccacacggtccgggaccatcggctcatcggccgggttggccgcgctggcatcagcagattcagcatccgcgctctccgcggcggcaagctccttctgaatggacggaatctcgccgtacagaatcttcgaggcctccgccaagttgccttcacgggtatacttatccgcctgcacgcgcaggtcgtcgagcttggcacgcaggtcgccgaccttgttgtggccagcctgttccgcatcccaacgcgccttgagaccgctgagcttctcacgggtgtccgcaagttcggcttgcagcttgcccagacgctccttggacgcaggatcctcggccttcttgagctgcatttcctccatttcaagacgggtcaccttgcgctgcagctcatcgatctcctcaggtgaggagtcgagctccatacgcaggtgagcggccgcctcatcgaccagatcgatggccttgtccggcagctgacgacccgaaatgtaacggttcgagagggtcgtggcggcaaccagcgcgtcgtcgccgatcgttaccttatggtgcgcctcgtaacgctgcttcagaccacgcagaatggcgatggtgtcttccacgctcggctcacccacgaacacctgctggaaacgacgctccagcgccggatccttctcgatgttctcgcggtactcgtccagcgtggtcgcgccgatcaggcgcagctcgccacgggccagcatgggcttcaacatattgccggcatccatcgagccttcggccgcacccgcgccgacgatggtgtggatctcatcgatgaaggtgatgatctgaccatccgcattcttgatttcgttcaggacgctcttcaggcgctcctcgaactcgccacggtacttcgaaccggccaccatggagcccaagtcaagggagatgagcttcttgccttgcagggtggtgggcacgtcgcccgccacgatacgctgggccaaaccctccacgacggcggtcttgccgacgccgggctcgccaatcagcaccgggttgttcttggtacgacgggagaggatctgaatcacgcggcggatttcctggtcacgtccgatgaccgggtccagcttgccttccttggcggcggccgtcaggtcggtggagtacttctctagggccttgtacgagccttccgcgtccgggctggtgaccttcgcgccaccacgcacgccgggtacggccttgcgcagggaggctgcggtgacgccgttcttctccaagatttcggccgactggttcggcttgctggccgcgatgccgataagcagatgttcggtggagacgtattcgtcgcccatctgctgcatttccttctcagcctgggcgatggcggcggtcagctggcggctggcctgtggctgcgaggtgctggatccggatgcgctcggcagcgcgaccaaagcgttgcgcaccgccgcgccgatggcctgcgggtccccgcccgcggcctcgatcagagagcgcgccacgccgttttcctggcgcagcagcgcatccatgacgtgcagggtctcgacctgcgcgtttcctgcggcggacgcactctgaatcgcgtcgccgacggcttcttgggccatagtggtgaacttctgttccatatcgtattcctccatatcatgcggtctgcgcagtgcggctcgcgggcttcgaaagccctgcgagcgttgcgacagaccgcagcttgtcgttgtctgatatggtcaaccgacctggaacccattctattcccaaaacttgagtgcatatgactcaagttttggattttggtggggagggtgactagtagccccctctgatgaggaagcttgggcagccgctacttcagtgcgccgacggcggattcggcggcggcgaggacttcgccggagagaatcgcctcggccacgccctcaatctgcggggtggtccaggtatcgcgtacgtcggggccgatttcgttggcgtactggcgcaccacgcggtatacggcggcgcccgccgcacccggacggtacggcttgcggaagtcgaaggagcggcaggagcacagcagttccacggccagcacgcgcgcaaaggccggaatcgaccggcgcagcttgcgggcggcggcccaacccatcgacacgtgatcttcctgcatggcggagcttggaatcgaatcgaccgaggcaggcacggcgttacgcttcatttcggagacgatgccggcagcggtgtattgggcgatcatgaaaccggagtccacgcccgggtcaccagccaggaacgccggcaggccgcggttgcgcgccacgtcaaggaagcggtcggtacgacgctcggagatagaggctacgtcggcggtcggaatcgccaggaaatcgagcacataggccagcggcgcgccatggaagttgccgttggactccacacggccgtccagcgtgacgcacgggttatcgatggcggaggcgagttccacgcccgccacggaggccgcgtattccacggtgtcgcgggcggcaccgtgcacctgcggggtgcagcgcagcgagtaggcgtcctgcacacgcacggtggagcccgggcggccggcctcaatcagaccagagtccttgagcatgcgggcgatgttcgcagcggaatcgccttggccgcgatgcgggcgcagcgcctgcaagtcggcggcgaatacgcggtcgttgccgagcatgccttccacgctcatcgcggcggcgacatccgcggtcttgagcagcaggcgcagatcggtgatggccatacacaacatgccgagcatgccgtcggtgccgttgaccagcgccagtccttccttctctttcaaatcgacgggcgtgatgccggccgcacgcagcgcttcgccgccgccgatcttgaggccgtcagcgttgcgggcctcgccttcacccatcgccaccaaagcacaggctgcgagcggcgccaaatcaccggagcatccgagtgaaccgtattcgtagaccaccggggtgatgccggcgttcagcatatcggcgtagacctgcgcggtttccgggcgcacaccggtgcgtccggtgcacagggtgctcaggcgcagcaccagcaggccgcgcaccacctcacgctccacttccggtccggcaccggcggcatgcgagcgaatcagacttttctgcagctgcgcacgctgttccttggggatggaggtggaggcgagcgcgccgaatccggtggagataccgtaatgcggcacggtgtcgtcggccaaatgatcgataaccgcgcgactcagcgccatctcatgcttcgattcgtccgaaatcgccactttggcaccgccgcgcgctacggcgataacgtcctcgatgctcagcgctccaacacctacggtgaccgtctgctctgccatgctcatacctttctatatatgtgccgcattccgcatatacgacatatgcggcacatgcttcgccggggatccgcgactgcccgcattcgctcaccgcacctgcccatcaacagcaggcgacgcaaacgcgaccaatcgctccccgagtaatcaaaccttggccatttcacctcagtcggatgcccgccataagccacttcgtccatcttgtgtctgaaatctcagacatgtaaggtgatggaaatatgagccatgcctcgcagcaatacgccttcaccgagccacgtaccgtcaagcgggcgcaggtgaagccatcagaacgggaacatcagacatcatcatccgcgccacgtgtctcgctggctccggcggccgaccgtacgctcgacatcctcgagttcatcgcgagcaatggtcagacgcaagccgccacgctcgctcgcgaactcggcattccgcgctccacggtgtaccaattgttggagattttggagcgtcacggactggtcacccgccttgccgagcagcgcgcgtacggcatcggactcaagactttcgagctgggatcggcctattctcgccaacatcgtgtatcgcaggtcgcgcatccggtgttggcgcgtcttgttgacgagaccggcgaaaacggacatctggccgtgctgcacggcaacgaaatcatttatgtgattgaggagcgcgccgcgcatcgcccgccgctagtgtcaggcgtgggcgtgcgcctacccagtcacctgaccgccaccgggcgggccattctgtccgcactcccccgcaatcaggtccgcgcgctatatcccaatcgtcaggcgttcaccgaccgcaccggcatcggccccaaatcgcccaaggagctggaggcaacgctcgccgaaacccaacgcaccggttttgccgaggaacacggagacgtgacgcccggctttgattcatacgccgtcgctgtgcgcgactacaacgactttcccatcgccgggctggctctcactttcgtgagcggatcgctgcgccccgaacaggagcggtcgcttaagaccaagctgcggcttgccggcacggaactgtcccggcgtctcggcgcggtcggcagtttgacatgaggattcgcgagatcatcgtgctgggctccttcgccccgatcacgattttctcaactaagttcaccgattcgctgaccggcaacgccaaactcgccggcttctcgctgacagtgacggccatcatcagcctggtggtgatgaccgccctgcacgcacttctgccgggagcgtaaggcgcgttcttggttccctcagtcagcttctccgcctggacggttcccctcagagaggggagccagaacgagtcacgcccgaacgattacgttgcgcagatcaccgatgccttcgacgtgcacgatggtctcgtcgcctgggtcgaggtggccggaggcgttcggggtgccggtcatgatgacgtcgccaggcagcagcgtggagaacgacgaaatggcggcaatctgctcggggatgccgtgaatcaggttcgcggtggtgccagacgccatcggcacatcctcgccgttcagcgtgaaggaaatcttggcgtccttccagtcgaggtcgtcacgcatcacgatccacgggccaagcggacaggaggtatcgaagcccttggcgcgcgtccacgtggggtcgatgccctgcagatcgcgcaacgtcacatcattgacgcaggtgaagccgagcacgtaatccatcgcgttctcgacggtcacgttcttggcgatacggcccatcaccacggccacttccggctcgaagttcatgtccttggagcaggccgggtacacaatcgggtcgtcggggccgattaccgaggtggacggcttggtgaagatcaccatgtcttccggcgcgtgggcgatttcggagtggccggcctcgtgcatgaactgggcgtgggcctcatagttcttggccagaccgtaaaccttggaggggatgaccggggagagcagacggatgccatcgccgtcgaccgggtaacgagtgccggtgggcttgacctggtcgccggccagcggatggccgtccagttcgatgaggtagtccttgccgtccgtttcgtccttctgcacgaaggcgtagcgcggcgaatcattcaaagaaaaacgtgcgagtctcatgcctgtaagcctactccttggcggttccttccgcagaagcatccgtccaaggagcaagcagaccggccttcaatcgaccaaaacgcacgttcgctgggattgctacttttcggtccaggttttgtcatacagcgactggccgctttgcgtgtgcatgatgacgcgcaatgatgccttgccgctggaggtcttgcacatcgagcccagcagattcgcggtggattgataggtgctgtccatagcatccagtgaggaagcggcggtatcgcctagcgaggcatagctgtcgtcgagcacgtactcgtacaccaaggtgtcaccgtcgacacggtagttgaaggtgatgccggtgtctgcaaacgtatccgcttcggattcaatggagtccttgaattccaaagagtcgacgaaatcctgaatcgaatcgtacagcccataatcgccgtcggttagatcgtcatgggtttcgcccaacgtgtcgtccagcacatcgtcaagattatcttgagctttgctcttatcgctgctatcaccgttgcccgaagaggactgactatagaaggaatcggttttcgcctcatctatagccttgctggcatacgaggcaccgccgacgatcagcgcgatgaccagtattacctgtatcaccatgcccgccgcactgatgatgatgccggcgatggccaagcccttgcccttgccgccctgtttcttaatctggttgaggcccacgatgctcaggatcagaccgaggagtgagacaaggaacgagcagataaaaccggcaatagccagaccgttgtacttctggttcgcttcaggcggcacactgccgtaagaaccagaccatcccggctggccgttcggttggccgccttgcatatacgggttatagggcgtttgcggaggcacggccccgccgcccggatataccggagcactgacgctgccgtagaccggaggaaccgatccgcctgccggagccgcccccggatagggcgaattgggtgctgccggtgcgggcgcgggcgcagcggcaggagtcactggtggcaaagcctgcgtaggcggtaccggctgattggccggcgcaaaaggctgggtgggctgctcggcaggtgtaaacgcctgcgtaggctgctcaacaggagtgaacgcttgagtgggctgttcgcccgctgcgattgcttgggttggagcattgttggcggcggttcccgtttccgccgtcatcgcatttaacggctcagtcggattggcgtcagcttgctgccacggcacctggccgttcggattgacattcggatcagtcatgacatgcactccttcaactgcatcgcaccccacttgcgagatgcgcccctcgtcttacgcgccacattgtgcgttacagacaactgtactcctcgtggcgagccttaagtacccaggaaatttgtccccgtcatcgacgcgacgtggcactttaccaattcagtcaaataattgcttcacgaataccaatcacgctcaaactttgttcatttggcgcggtctccaaaccagctgttcaaaccactctctgcggagcgattcttgcgtcagaagacgggcagcccctcgactggctcgtagcgtgtggcgcggccacgaccacgagattgcgcaaagccgtcttcaacgagacttttcagcagtgcccgagcacgcgagacccctaattccatatgctccgctaattcggaagttgatatgctgccttgactcacaagatactgtagcgcttctgattccgatttggagaggtgtcccacggaagtccaggatttcatggactcgctatttgctggcgtcataacagatccgccaaggtttgtgtaccgtactacaagttttacgcgatcaggacgagttagcacttccagcagtggatgcggcgcgccaacagaatcacaaccagctcgcatcacatcaaagccacttcctgctttttcaccgataccgatgagaaaaaacattttcatgaggataggattgcgtgcatcagatattccaccttgctccgcctcggcctttgtaacacggagccgcccaggattggtgaactcgatggttgattggcgcctaataatcacagtgcctcttctacccatatagtccgcatgaacgatagcgttggttaacgcctcgcgaatagtgatttccatgggattttcatccatacgtcgcgcttctccgtccaaacggaatgggcgcggcaccgcctgccgcagcctaccatatactgactgccaaaaatcatataagttgccggaccaaattccgtcagtagaggtaatgcgatcatcccaacgatcgagtccaatttcttcacgatagtcaaggaaataatttgcgaattcccgcacgatatcatattcgcgcccaaacatcagcaatccagcaatagttggatgcaactgattatctttggtagaacgagcgagcgcctgcagacgcacgagaaaatcttcgtcattgaggttacgccacggatggttcgggcgaatcctttgaaaataagaacggtacgaggcaatcgtgcctgaatccaatgcggcactacccaaatcttccacgatacgaagatcctgaggagtgtcactgccatcgcgaaacattgctttgacttcatcccggtcgcaatggtagtcaccctcgttattccttctgaaggtgcccctatgctgttcccggctaaaaggatcagcgcccacatatataggcatgatctcccgccctgcacgagggacatgaatcacgatgaaatcaccggacgatccatgtcgaatcacaacatcttggtcggaaagtactgtggcgttgaccttggaacggtcattgacagtattccaaaaatcccgtttgagcttttctgcatccgttacccctgttacattcaattctcgtcgcgagttctctgaaacaccaagaagaataagaccgccatcagagttggcaaatgcactatacgtatcccatagactgtctggtaattgggttataggccaaaatgtgtgtccgttttggcttgtgttcctttgtggcagtgggcgtttctcctgttcgagttgtatgggcggggaactcgaggtcggccagaatgtgtgtccggaatggccggtcaggccttgcggcacaacggttgagtgactttcgagttggcgtggcagattgggtggatgaacacaccttgttgcgccgtgtgcggcgagccgatgaagcggaacggaaggacgagctcgggacggatcaggtggcggtgccggaacgccggctgcgggagctcacgcacccagtcgcgcgacaacagcgcccgtgatctgcggtgcggtctggactggctgttctcgaagcagtcgcaggccgagcaccggctgccggcacgcacgctgcgccgccggtgcgagctcatgtggggcctgtggccgcccgtgccgctggtggacgaggtgcatcatgtggtgcatgtggacggcatccacctgcaccgcgacgcggtggtcctgatcgcggtggccggcgggcacgtgatcggctggcatgtcgccaaaagcgagaaagcggcggcatggcagtgcctgatggcacgcatcgcgccgcccgacgtgctcgtatgcgacggcgggggcggcgtcctcaaggccgcgaaggccacgtggccggatacgcggatccaacggtgcctgttccacgtgcaggccaacatcctcgaactgaccggcaggcggccccgtctggaggccggcaggcagctgcgccgggtggccctgtccctgccccgcgtcggggacgcgggcggcgcggccgaatggctggtctcctacaaccggtgggagcaggacttcgcctcgttcctcgacgagaagagcgaatacgccgacggcagtgtgaacgacatgcaccaaaggctcgtcaaggcgcggcgcatgatccgcagacgcatccgggagggtcagctgttcacgttcctcgacgaggggctcgcgtccgtcggcccggtgccgtccacgaacaatctcatcgaatcatggaacgcgcgcctgcgcgacatgctgcgccgccaccgtggactgcggctggtcagacggctgaaggcgatctgctggtggtgccatcagcacacggcgcatcccgagaccgacgcatggctcgcggccaacgcgatgcccgatgaacgactcgagcgcctctaccggcaggcatgggaaaggagcccgcaaggccagtacgagacgttcggcatccccgcaagatacggcaccggcatcgactggaacgagttccgcacacgggtcgaatggcagtcgaacgactagaccgccggacacacattttggcctataaccctggtaatttgtctttggcctttttcgcctcaatacaattatcttctcgaagtagcctcacatccgactcggaaaggctggcaagagaaatcaactcaataacgtcagaattcgccactttatacgcctttccgccagtctaccgccactttatacgcctttccgccagtctaccgccactttatacgcctttccgccagtttttcattctggggaagccgagccatgttcaagcagcgtcatccccccacttgcaacgttaaaaacacaaaagcctgaaaccggctattgcctcagcaatattcagtcggtttcaggctaaatcgttaatcctctggcgaaacgacggtctacttcttcagtagcggcgcgacttgctcctcgtaggcggtcagggcggtgtcgatcacgttgtgcatgtcgtagtacttgtacgtgcccaggcgaccgccgaacacggtgttcggctcggccttggccttggcctcgtactgggcgtacagtgccttgtccgcatccgtgttgaccgggtagtacggctcgtcgccacgctcggcgaaacggctgtattcctcccataccacggtcttgttcgggttctgggcatcgtggcgctccgggttgaagttcttgaattcgatggcgcgggtgtagggtacgtccgcgtcggagaagttcatcaccgggcagccgaagtggtcgccctcatcatagcggacttctttgaagtcgaccgtgcgccacttgaggtcgcccagctcatagtcgaagtaacggtccaccgggcccgtgtacaccaccggcacaccggcggccttgagcgcggtcttgttgtacggctgggactcgtcgaagaagtccacgccgagctccacggtgatgcgcgggtcgtcgatcatcttctccatccacgcggtgtagccgtcggcgggcaggccctcccacgtgtccttgaagtagcggttgtcgtagttgaagcgcacgggcaggcgcttgatgatggcggccggcagctcggacgggtcggtctgccactgcttgccggtgtagttcttgatgaacgcctcgtacagggggcggccgatgagctggatgcctttgtcgttcaggttggccggatcggtgccggccagctcgcccgcctgctgttcaatcagggccttggcttcggccggcgtgtagtgcgcgtggaagaactggttgatggtgccgaggttgatgggcagcgggtagacctcgccgtcatgcgtggcatacacgcggtgcacgtagttcgtgaagctcgtgaagcggttcacgtaatcccagacgcgcttgttggaggtgtggaacaggtgggcgccgtacttgtggatctccgcgccggtctcctcatcaaagtacgagtacgcgttgccgccgatgtggtcgcgcacgtcgatgatgtgcacgcgagcgccggtgtgctccaccgcctgctgcgccaccgtcaggccgaacaggcctgcgccaacgataacgagatcgggatactgggtggtttcggaattgttcggcgcaccggccatagcaagcaacctttcacaggtcatgttcgttttacgaaagaccatgttactcggccaggagaaaatcaggcaatacgataaactatccgtctgcgcagctcggctaggaaacgtgccatactggatacgtccgcatatacaaagaggaagcacaagccttgccaaacaacgccactcccctcatttccgtgatcgtgccggtatacaacgccgaagactacctgcgctactgcgtggattccattctgcagcagtcgtatacgaacctcgaggtgattctggtggacgacggggccaaggattccagcccagccatctgcgatgagtatgcggcgcaggacagccgcgtcaccgtgatccatcaggaaaacggcggcatcgccaaggcccagaacaccggcctcgatgccgcgcatggcgagtacatcgcgttctccgacaacgacgacatcctcaaccgccgcaatatcgaatacctgctgcacgcactgcaaagcaccggggcggatatgagcaaggcccgctggcgacagttcggcgtctcccagctgggcgaggtgtccaaagaggccgagacgggcgcgcaggagcccggcaagatcaccgtgttcgagcatcctctcaccgcctaccagaccgtgttctgcaaaagcctgcgactgctcggcagcaagctcggccgcaacaccgaggcccgctacttcaacgaggcgaactggtgccgactgtacaagcgcgagctgtgggacggcctgcgattcccggagggccattacgcgcaggacatccgcatggcaggccccctgtacgcccgcatgggcaaagtggccgacatcgattgcgtgctctactactggcttcaggagcccggctcggtgacgcactcaaaacgaaccgccgcattctggcatgataacgtgctctccgcagccgaaaacttccagttcactctggagcaaggcatcaccccttgtaggaactacttcggcttgaccgccagcgtacgcgatgaaggcaaaggcctcaaggcgctcggctccgaagaactacatgacagcgactggcaaaaccatctcgatgacgtggccaccatgcgcgccctaatcagcaagctgagcatcggcgaacgcctgaaatgtgcagtgcttgccacgattcgctcctgcgaaaatgtggtatacgataaccgcatccactctatgaagtagagaagtcaccgaatccagtaaacccctaccctcagttggctagggcgtgctgacgtccgtttctgtcatcgactacgaccagtcccagcaggaagaccggcaatatcggaagtacataacgaccttggattccctcaaagacctcaaacctactcattgacgctagatcattccaggtcagtcccacaaagagcacaaacgctgctatctcagcagccgctattacgagagccagaatcaggaatcgatgtcttcccacccataaggctggtgtcatccgacccgtccagtgctgcttcaccgtatagaccgatgccgccagccaagccaccatcagaacagccgccattgcgacataccaagtcggcagataagcaaaagtcccgagaaatagcatggaatgtacgattttgccgatggtgagtaccggatgagacaacgcgacactcacattatgtgatacatccacctgcgccaacgaactgccgaacagcacgctccacggaagatacaacgctcccgtcagaaccgccgcaatccccacaaactccagcttgcgacgtacggtcattaccgcagaaggtaggaacagtaccgcgaccgacacaaacgcatagggaggtttttcacacgctaaggcccacgccagcacccccaataccgcagtgtacgggagagaaatcacacgtttgccctcggcagccgcagcgatagccgccaccatgcaggccgaaagtgccacaatcataccgtcaatcatcaggctcgacgccacaaacgccgctggcggaataaccaacaacagcgccatcagcgatttccaacgcggcagcagcgcaatggcaatgcaccccataatcgcatacagaatgctgttggatattcgcgccgcctgccactgcgcgtacggccgcaagttcatcagcatggcgattttcaggccaatggcttggggcaagtaatcaagcggaaaatacgcgttagagcgattggtgtgtgtcccatccggcacaacgatgtgatcagccatcacatcatcagcactttgctgcgtttcccgcgacgaatcgccctgcgtcgccctactgattgactcaacaatcagaacgttcgcgaatcctggaatcgtcagcaaacgcgaatcaccctcaatggactgttgcttgacggtgttgccgtgcgcatcctttccctttgcaacaggattcaacgattgtcctgtggccaatgcgtacgtggacaacggatgcatatcaggatctggaatagtgagagggccaacctagacgatgaacatacaggcctgcagcgcgaacaacaccaggaagataaaatattgcacgcagtccccttcaagacatgtgccacatgcttcataacgccctaccttccggtcattcgtccacagtctaccgcacacacaccgcaagggcctaccaatacctggtcaatcccaacataattcgccacagcacatttagggatgactttatcttgggcttcattattacaatactcaagtacgttgtttatagaaatgagcgagcagagtgaacgacatccaaaacgatcaggaaccttcagcgcaagagtctggcacggatatgggaaaaaccgaagtcccagccgttccctcaaaacagaatgacgatcatcagagcaacaaattgccgctgcttttcgcgttgaactttagcatattgatggcttcaaagcccatggcccgatgtctatttagaagtgcaacacccttgttggtcctgtaattctaacagttcgtcggcgaacgcctcggcgggcgtgcggtagccgagcacgcgcatggggcggttgttgatctcgtcgacgatctccctgacctcctttgccatgtccatccggatctcgcagcgtttgggcagataccggcggatcatgccgttgcggttctcgttgcttccccgctgccagctggagtacgggtcggcgaagtacgtggccatgcccagcccgtcgcgcagcctttcgtggtgggcgaactcggtgccgttgtcgtgcgtgacgctgacgcgcgcgccggccggcagcggcgagaacatgtccagctgcgccccgacgctctcgccggcggtcttgtccggaacgatgcgggccatgaggaacctggtccttctctccacctcggtgtgcaggttgcatcccactccgatgacgctgtcggcctcccaatggccgaacgcgctcctgccgtcggcctccggcgggcgttcggagatgggcactcggccggggatcgggaagcgcgacgtcctcctgccgccgtgcctgcggcgccgcctgtgccctcgcggcaggcaccgcgcccagcgttcccgaagcggcctgctggagtagacccatcggtagatggtctccgggcacacgcgcatgagcgcatcgtccggccacaggacgcgcagcctgccgctgatgagcagcggcgaccagccgcggcccagccattcggccacctgcgcccacaggcggtcgtgcgacagccggtagggctttcgtggcttggatctcctgcggtcggccttgcgctgcgcgggcccggcgatgtagtagcggccggtccatggccccgccttcagtcttttcggccggtacgggcggtacgactcgttctcgttggacgggaaccatgtgttgcgcttgatctcccggctgatgctggacgggctgcggcccagcatcgcgccgatcccgcgtatgctggcgccgttgcctacctcgatctggatgacctggcgttcctcttccgacaggtgcgaatatacttctcccataggtgcgacatcccttcggactggttttctaggcaatttccaatctaacgggtgttgcactttcatttagacaacgggtggtcatgctggccaaagccatatctttcttgcacacactattgaagaagcgcccccgctgcccctacacgttgtacgtagtggtcatggcaatggttgacgccgcagcagtgctgttcatccaatggagcatgtacgaggaacccacatatgccgatccggatgcagtagatggcaccaccaaaatgttcaatagcgtggctgggcagctgacgaaattcgttgcccagatgtggatggaacacaactacgtctggctgctcaatttcctagtgctaggcatggtgtacctcgtactggtattcgttttgaaccgattctgggtggcgaccgccctattctccattctcacgtcaatctacgccgtggcgaatagcatcaaggtcgacctgcgcaacgaacccatcatcccttctgatttggggttcctctccagcggcaacggtggggaaatcacatcattcatccctaaagacagccagccactggtcaacggcaccattaccatgcttatctggctgactattatttgtctggcattgcagcttatcgatggtcgccgctgcgtgattccgttccactggtggcacccattccgcaatgtcaagaccatcatcggcaactgcacacgcatcatcgccgtagtactcagcgtttctctactgtggtcattcacttggaatctgggaatcaacggctcatggtcctacaaatgggcaaagagtctgggcgacaatcccctgctgtggagcacggttgttgacgccacctataacgggccaaccgtgggctttctgcggctggcacacgcaaaaaccatggataagcccaaggattacaacaaagagaccatggaggctttggctaaacgttataaggaaagcgcccaagccactaacgaggcacgtgccaataacctcaccgacagtactgtagtcatgattctttcggaatcattctccgacccaactcgcgtgccgggagttgaactcactgaagatccgatgccgaatattcacgcccttgaaggcattaccacttcaggcctgatgctttcgccgggcatcggtggaggcacagccaatatcgaacatcaggcattaacaggccttagcctggcgttgttcgacaattccatgcaatcgccttatcaggagcttgtcccgcaccagaaaacgccttatacgttcaaccaaatatggaatgatgcttacggcaagaatggttccgtggcgttccacccatacttcaagaacatgtatctgcgcgatagcaactacaagaaattcggtttcagcaagttgtattcgcttgatagcgaccccgcaatcgagcatcaggaccatatcgacagttcgccatacgtgagtgatgccgcctcgtatcagaacgttcttgattcaatcaacagcaatgatcacacccagttcattcagctggttaccatgcagaatcatgcgccctacaatgatttctacgcggacaaccagttcaaagaagccgatgtttcccaactctccgacgaagagaaacagtctatcgataattacgccaagggcatcagcctcaccgatcaggagactgcggactttttgaaccagctcaatgcagtcgataagccagtcaccgttatcttctacggcgatcatctgcccggcacctacagcaccgcgaccaaagacaagaacaatactcttgtcatgcatgagaccgattactttatatggtcaaatcaggcgtccgcgtctgccggtgtcaaactcgacccgcagaccgccggctatgtctcatcgaactatttcatggctttggctgctgaacatatgaatgccaaggtgtcaccttatctggaaatgctgacgcaggtgcaagcgcagattccggcaatcagccgactgatcagctccaacgattcctggggcgatggcagcaccgcctatctggatgctgaagggaaccgtctcaagcgtaaggatctctccaaggaagccaagcaactactaaatgattaccgtctcgtgcaatacgatatgagtaagggtaagggctaccttaacgacgatggattctttgcagtcaagtaagcaaaaggggcatcagacggttgtccaatgccccacgaatcgattacttctctcgaacccaatagttgcctgatgtacgagacaggtttggattgtaatacggatcgttatctacgatttcggcatacttcttgcggaatttcgcagattcccgatccagtcgagccttctttttcttgctctcgatatcgtacccgcgcgtgacggactcgtagtggtatagctccacctcatgcgcccacacgatgtcacgtccaagctgttcgtgaatccgaatgcacagatcgacatcgttataagcaaccgccaaagcctcatcaaagccatgtaccgcgcggaagtcatcggccttcaccatgcagcacgccgccgtgatggcagagtaattgacgttttcgatgagtcggccgaagtagccaaaatctccacgggggaaaccgacctgaatgtgtccagccgctccgccaagaccgagcacgatacccgcgtgctgaatggtctcagtaggatagtacagctttgctcccacgacgccgattcgatccagctgcgcgaacgacaccattctggtcatccaagatgggctgatgacttcagtatcgtcgttgaggaacagcaagtaacgaccggaagctttttgagcagctatattgttaatccgcgagaagttgaacggaatgtcaatctcttccacacggaaacgatcaccaagcttcttggcaaaacgctcgtacaaatcctgcatatgcgggttgtcgctgccgttatcagcaatgatgatctcataattggggtagtccgtcttgtcaataattgagctgacacaacgttcgatattgtcgtacccgttcttcgtcgggatgattaccgacaccagctcgtcgccggagacatcgtaatgcacgttataaatgccattcggaccggcggaaaccacttcagcctgaataccgcgtctctcaaccgccgactgcaatgcgcgcaaaccagcgtcggatgtgtagctcttggcactgccgctggatgcggtagaggttgccaaagtgcgccaatggtagagtaccttcgcgatgtgctggatgcgatcaggggtggttttttctacgaagcgaagcaccagatcatagtcctgcgagccctcatagccgactcggaaaccaccaatctcatctacgatgctcttacggtacacaccaaaatgactgatgtagttggtgctcatcagcaaatcgggagaatagttcggcttgaaatgcgggtcgaagcggttcccctcttcgtcctctttgtcttcgtcactgtagataagatccgtgtccggatgctcattgagggtcttcactacctcaaacagtgcctggggagccagttcatcgtcattgtcaagcagaccgacgaactcccctgaggcctcttccaaagccgaattcgttgctctggaaatgtgcccgttttcagggcggaacaccactttgatgcgagaatcctgttgcgcataccgttcaagcagcggacgcacatgcggctcggacgaatgatcatcagccaggcacaactcccagttggaatatgactggttacgaaccgaatccacacacttttccagccacttcggctccacgttatataccggcaccagcagcgaaatcaacggctgatacgcaaacgaggcaatctcattgcgcactgccgtctcgtcgtaacgctctgttcgacgaatgaggttatggtacacgtgcttctgccaacgagggccccaatacttatccagcagacgccttgtggtacggcgaggatgccccagcagtgcgaccttgcgcaagaagttcgacaatccggcaagaacggacgacgactgaaccgggatgatgacttcctgactatccgtagaagtcctcaggcgcaaacgcagcttgtcgttcgccagttgcttacgcccgcccggtaccgatatttccgcacggaaaccaaggatcgaatccgggggaaccgtagttattgcattcacgtcaggacgaccgtaacggctcaggctgcgcaaactcgccacaggggattccaccagagagatatcgacctgttcaccgccgtgtatatcggcagcccatccgttaacgagcacagtagatccatcttgcttggcatccacctgatcaaggttgtatacaatgcctcgctgttcctcggaagcaggcgggaagcatgcagccgcaaacggatcaacgatctcgcgatgcatcttcagatattctgcaacgtcatccttattgattgacaagtgagtacgcttgcaatccgtgaaaaccgaatacggctcccaaagcacagtatgaccggactgctgatacatgcgagcgcaatagtcaataccgcgcagtcctgccgccaggcgcgtattgagtccgccgatttccacgaattccttgcgacgtaccagcatgcaatcttccgtggccgcgaacatgtcacgaggaagcagatccctgaagtagtagccgattccttcatcccaggaaccgcgcatttcaaaaggctcaccttgtttcaatgcccgaagggtaacgcccacattgagcacacgcttcttggcgtcaaataccttgccacccacaacgccaacagaagagggacgcgcataattcaccatttcgcgtagccatgtgccatcggtcggcttcatgccgtttaacagcacaatcaaatcttcggaacgacgctttgccacatcattcacggaatccgctgcagcagcaatcacagtgaacgacgggtaatccgtcatctctcgtagctgcttcacttgcgcatcagtcagagaagaagcaaccaccgcaaccgtcggggtgtaatcggcatagtcaatcttatacgtaccgagattgtcgagcattcgcacgtcaccggctattcctcgacgctccaaggccgcttcgattgccttgcgaccagcctcataggcatacatcttgcttcgggggtctccggccacagagcttgcaagggtgcgccagtggtacagcatctgcggaatatgatgaacgtgatgtgcctgctcggtggcacgcagcacgaagtcataatcctggctgccgtcgtattcgctgcgcaatgcgccaaccttgtccaacagcgcacggctcactaccacaaaatgagtgatgtagttatgccccagcaaaaggttcggcgagtaattcggcttaaagaacggatcaaagcgcttgccttgctcgttgatcttgtcttcatccgaatacacgaaatccgtatcgggctggtcattcagcgcacgaacgacttcaaacagcgcctgcggtgccagttcatcgtcattgtccatgaaaccgacgtaatcaccggtagcgagttctatggcagaattcgtcgccgccgcaatacgtccgttgctgtcacggaagacaattttgatgcgcgaatcgctcgcggcaagctcttccagcagcggcttgacgtgtgcagaaggcgaatggtcatcagccaggcacaactcccagttggagtaccactggttttgcatggattcaacgcatttgcgcagccagacctcgtccacgttgtacacaggtgtcaccacagagataagcggagtcttggaaaatgcggcaatgacaggctcagcttcttgctgggtcatcgtttcatggcgctgaatccacgaatcgtaaaaatccgtctcaccaacaacgcggcgtttcaccgcgtctcgcaaatccttcatcgcctcgcgattgccaaggtgcgcggcataaaacatgagcctgtgcacgcgggtgctgatgtattgcatgcggaatcgactcatcaaacgctgaacattgatgtgccttgtcatggtcgtgccaggcgcctgacacatcaagtcgaaattctgcactccctgaggaataacaatcgtgaagcctgcttgatcgctgggatccaatccatacgtcttttccagatcaacacgagtattccgcgataccgtcacacccatgccggctaccgccaacggcagggaggtctgcctcatcttgtcgaccgcccagccggtcactatagtccgagactgttccccaaccttgacgttctctactttttcgactgttacctgatatgtacgatcattcaacagcgtcagcatgcttgttctgtccttatcatctcagcagacgaattaatcgattgtcacttgcaccgtattgtccgggttcaccactgacatcacttccgaggcggatcccttgatgtggaatctgcaggcattctccgccaactgcaaacgctcagagtccgtctgcagagcaatacagatgcggaaatcgccaaatgcgagcacattcttcaccgcaaattcggccgtatgcttaccggctgaaatcttatcgtcctcggagccaaacggcatggaaagcacgggaacattgcggccatcaaacacatcgatgaacagctggttcgcaggaaccggacgatcgcattcgaagtcaacattcatggtgaagtcctcgcgcgtatccaggaatttctgcgtctcgccatcgacggcaacgtttacggcattcacggtcacggcattgcgaatagccgcttccttttgctgtgcctccactacttcgcgcgggggaaggaacgaatccgagtaagcatcggcaatctcgtcagggtcgccgatcttcgcaatatagccgtcctgaatgagcattgcccgatcgcaatacctgcgcacatccggcatggagtgggtgaccagaataaccgtcttcttgttgcgcttcgcctcaaagaaatagttctggcacttcttctggaaagcttcatcgcccacggcaagcacctcatcaagaacgaggatgtcgccctgcgatttaatcgccacagagaatgccagacgcacctgcataccgctggagtagttcttcagcttctgttccatgaagtcgccgagctcggcgaactccacgatgtcgtcatacatggcatcaatctcgtcgttggagaaaccaagcatggcaccattgagatatacgttctcgcggccagtcagttcaggattgaatccaacacccaactcaatgaagggcacgagtttgccgtccacctcgattgtgcctgtattcggcgtgtaaatctgggaaatcagtttcagcagagtggatttaccagagccgttcttaccgacaatgccgaaaaactcaccttgcttgatatcaaaggtgatgtctttcagcacttcctgcgtacggtacccgcgaatgccgcggagccaattgaacagcatgttcttcaggctgccagcacgttcaaccggaagtttgaagttcttggatacgtgctccaccttgagcgccaccggtcggtcagcgttcttctgctccatcgctttgtccatcttgttcatcgtcacaccaactccgcgaagtactgggatttaacggtgaaatacttcaaaccacccaagaagatcagtacagaaagaataatcggccagcactgcaggaatgggttatccacccactgccaaatggtctgatttgcagggctaatcatcacatgacgcgcatcctgaacgatttgcgccaccgggttgagaatcagatcgagccgggcaaatatcggaccatactcgcccgcctttgaagtgataagggaaatagggtagataataggcgtggcatagaatccagcctgcattaccacttcccagatggggttcaagtcacgcagattgacatacacggcactgaggaagaaagcgattcccaacgacagcatatacagctcaagcaccagaggaaccatcagcaaccacgaccaggtaagactgacgccgttaatcagagcaaataccactaccacaacaaaattgatgccgaagttaatcatggcactcatagatgaggcaatgacaatcacatacttcgagaagtgaatcttacgcagcagatcaccgtgtcccacaatcgacatcatgccgccggtagtggtttcattgaagaaattccacatgatgatgcccagaagaagagccacagagaagtgcggcacatcagcaccgaacttcaggaatcggacgaacacgagatacatgatggtgaacagcatcagtggcttgagcacagaccagatgtatcccaagaaggactgctggtagcgaagcttgaagtcggtgctgaccatcgccttcagtaataggcggttcttcctggtgaagatttccgtgatgttcaaaattgctcctcaaatacaacaaacccgcatattttatcagcgcggactaacaatctatgcgggttttcagtgaaggtctatcgatccatcggtttgacgatgaacttattatccgccacatccttcagatgcttgccatacgggctcttgccgtacttcacagcggcctccatcagctcatcacgagtaatccaaccgttctcaaaagcgatctcttcggcaacggcgatcggcaggccctgagcacgctgcacggtgcgcacgaattcgcctgcctcatacagggagtccatggtaccggtatccagccaggcatagccgcggccaagcgtctgcacgttgagggtgccgtcttccaagtacatcttgttcagatcggtaatctccagctcgccacggggagacggtttgacctgcttggcgaactcggtgacgcgttcgtcgtagaagtacaggccggtcaccgcatagttgctggccgggtgctccggcttctcaacgatggagatggccttcttgttctcatcgaattcgaccacgccgtatcgctcaggatcgtcgacgtagtagccgaacactgtggcaccatgttccaccgtggcggccttgcgcagtgtcctgcccaaaccgttgccgtagaagatgttgtcgccgagcaccagcgcgcacggctcaccatcgatgaactcctcgccgaggatgaatgcctgggccaggccatccggggaaggctgcaccttgtaagagaagctcacaccatactgggagccgtctcccaacaaacgttcgaagttcggcagatccttcggcgtggagatgatcagaatgtcacggatgcccgccatcatcagcacgctcaacgggtagtaaatcatcggcttgtcatacacgggaagcagctgcttcgaggtcaccgtggtcagagggtacagtctcgtgcccgaacctccagcgagaataatgcctttcatgaaaaacctgctttccacaacgttttactcgttattcgtctacaaacgtattcagcttagctaactcttattcaaaatgaaaaaccgcgcagagagcctgcgcggttttatcacttgaggtcaactgttatgaacaactatcagccgagttccttctccacgtaggtcttgagggtctcttcccagtcggcgggcacgtatccggcttcaccgatcttggcaagatccagtgcggagttgaccggacgcggagataccgggttggtcgcgttcgcgaagtattcggcggtgctgatgggcttgaccttgctgccgttgccgttcgtcaggtcgaacacctcggccgcgatatcagcccaggacttcaccgcaccggaaccggtcaagttgtaggtgccgtagggggcgtggctatcgagcaggtggaaaatcgcctcggccatgtccttggtgaaggtcaggcgaccgtactggtcgtccaccacggtgacctgatccagcttgtcggccgggtcggcgaccttgttggacagcatcatcatggtcttcacgaagttgtgcccctcgccgatcacccagctggaacgcaggatgtaatgctcgggtgcgttggccacggcgatgtcgcccgcggccttggtctggccgtacacaccgagcggggcgaacgcctccgtctccgtgtgttccttggcggtgccgtcgaacacataatccgaactcacgtgcacgagggtgatgtggtggtccttggccaccttggccagcagagccggaccctgggcattcgccttccacgcgatcggacggccttcggcggtctcggccttgtcaacggccgtgtaggcaccggcgttgatgatcgtgccgtacaggctccaatcgtatgcctcgtatgccttcgggtcagagaagtcgaactcgtcgatgtccgtgtactcgaagccctgaagatcatgggcctcggcgtaggcgcgaatcgcgtggcccagctggccgttgcagcccgtcaccagggtgcgcttgggagccatgggcttggcgtccttgagcatcgggtggtgcagatcggcctcggagcgctcggactcctccagcggaatcggccactggatgttcagttccggatccgcaaggttcacgaacgtgtaggtcttcttctgttcgagcgaccagtgcgcgttcaccagatacgtgtacacggtgccgtcctgcagtgcctggaagctgttgcccacgccgcgaggcacgtagattgccttggacggatccaaacgggtcgtgtacacctggccaaagctctcgcccgggcgcaggtcaacccacgcgccgaagatctcgccggccgcgatgctgatgtacttgtcccacggctccgcatggataccgcgagtgacacccttggtggcgttgtagctgatgttgttctgcaccgggccgaagtccggcagacccagacccatcatcttggcgcgctgccagttctccttgaaccagccgcggttgtcgccgtgcaccggcaggtcgaacaccagaaggcctgggatgttcgtcttctcgaccttcagttccttctcgaattcaaatgccatgatcgaatcactgtccctgttgcttgtacttggcttcggtggcggccttggccggctcccaccaggcgcggttgtccgtgtaccacttgatggtctgctccaggcccttctggaagtccgtgtgcgtcggcttccagccaagctcggtctgaagctttgtgctgtcgatcgcgtagcggcggtcgtgtcctggacggtccttgacccagtcgaagtcgtccgggctcttgcccatcacggtcaggatgtcacgcagcaccgtgatgttgttgcgttccccgtccgcgccgatcagatacgtctcgcccaggcggccctgggtcaggatggtccacacgcccgtggagtggtcgtccgtgtggatccagtcgcgcacgttctccccgttgccgtacagcttcgggcgcaggccctcaaggatgttcgtgatctggcgcgggatgaacttctccacgtgctggtacgggccgtagttgttcgagcagttggagatggtggcgcggatgccgaacgtgcggtgccaggcgcgcaccagcaggtccgagctggccttcgtcgagctgtacgggctggacggatggtacggggtctgctccgtgaacttggccggatcgtccaaagccaggtcgccgtacacctcgtccgtgctcacgtggtggtagcgcacgtcgtacttgcgggccgcctccaagaggcggaacgtgccctccacgttggtcttcaggaacggctccgggttcgcgatcgagttgtcgttgtgcgactcggccgcgtagtgcacgatggcgtcatggcccggaacgatcttgtcgagcagctcggcgtcgcagatgttgccgtgcacgaactccacacggtcgcccagaatgcccctgatgttctccaggttgcccgcatacgtcaacgcgtccaaaaccgtgacatgcacgtccggatggttgttgtacacgtaatggacgaaattcgaaccgatgaaaccacagccaccggtcacaatgatgttatggggagtaaacagttcttcagccataacctacagcatatcgtcaggcataccgagacggcgagaaaggacattgttactggtgttgaacaatccgatatggggttcgcccatcaatcgtttcgccaatgcgctcgaacgaatacccattgaactgcatcgcatccagtttctgcggagaaagcacattgctcacacctagcttgcgcaattgctccggcgtgacatgcacggtaaacgaatcaggcgcgactaatgtgaacacatcggccgactcctgttccacgacgttcacagaaacaaatgcataccgattgtagatttcttcccattgtccattgggatcaagcttcttccatgtggcaagatcaggagtgacttccaaagcattcaatgtgtgtattccatttgccactgcaagattcgccagctgagagccgaatgcgtcatctattgcccacattcctggattctcagattgcagcgactgcacttgttgtatcagcggctgcttagtcacgggcgcactcccatactgcacaggattcacagacaaacctgataccaacagcccaacggacacaattggcgctacaactgtgcgagcaattacgccgttattcagaacagcgaaactgagcaaacctgctatggcaaaacacgccacgaccagcagccgcccaatgtacgagagatacatcgcatgattagcccatgccaatatcacggcaaacacaaaagtcaccagtaatgactgcttccaagaaagtctgccatcgataatggccgccgcacgcaccaacactgcgatattcgcaacgcccaaaaccaccacgcatcggccgctagtcacagaagtcagcatcattatcttagaaagccaaagcggcatacccacgcaggcaaatactgagaacaacgctatgactgcaataagccagacactaagcacatccacttttttgcgctttatcatgccgaatacggcaagaattattccgagcgggaatagatctacgaaacgtgatgcctcaaccatatttgttgttacagagtcaacggcataatccttgaacgggaaaaagagagtgcccacggatgatatcagcgacagagggggcagccctcctccgatggattgccttgcgcccggatatgccgtgtgcagcatggattgaatcgtgccccacgaagtcaccactgcagagccaagaatcacacagaataaggcaatttcgcccacaaaaatcagggtgtctttccttgaaattcgaatatgtccccaatgccgtatgacaatacaaagaatcagcaccgcaagaagataacccagagagatttgccatgcgggatacaaggtcagtgcaaacatcccggcgcatatcagaatcactgcggcatatgcggccctatggccagactcggtatcgccaagatatcgatcaaagcacacgatggacacgaatattgcgataagcatctcaggcagtgcgttgactgcgaaccaccattgcaccaacggggcacatgcaatgaggattgcaccaacgaacgctacacccttgtgtttctcctgccggcgatcattgctgatgcagaggaagaactcatatgcggccaagaaaagtaccactaggcgcgcagaccaataaaaagcaagtcctcggctactgccgaagaggatatacccccaatggaacggcctgaacaactcggcaagagccagcacaggtgcatccttgacgatgaacatgtccgccggtttattgccaaacaaatcattatagtagctatacccggagtatctttgcgaaaaagccagaggagtgcccaccacatattcgtcggttcgcattatgcgaggggttccccataccacgtccgtagacatgtcatgtcccagccagtaattccacatgcctatggatgagccgctaatattcaacagcacgcaagccgctatgacacttgctccgagtatgaagcgatggcggtgcatccacatacccaccggcttcgcgccaaaagcaatcatggcgccaatcaccagcagaggcatcaatatcagcaggaaccggatgcacagcaccggaacagactccgttgaagcaacaggagccagccgaaacagacgttcgcgaatgcttggatacgccgacataaccatgcttgacgccactgctgcgcatatgaataccgctatcaggcggataagaaaacctcgggcagcaagaggtgatggcttagagtaacgcgtcccttgcagtcgctttgttgccaaaatacttccttaagtgtcgtacacgggtactggccaacaagtatagtaaccaccatgttcgagaataatcagccttccgttgcggtgcttcttccttgttttaacgaggaagtcacgatcggcaaggtagtacgagatttcaaagccgcgctgccgggtgctgcggtctacgtgtatgacaacaactccaccgaccgcaccgccgagattgccgcagccgaaggcgccatcgtgcgcaaggagccccgccagggcaagggcaacgtgatccgcgccatgttcgaggacatcgacgcggacgtgtacgtcatggccgacggcgacgacacctacccggccgatgccgctccagccatggtggccaaggtgctcgaaggctacgacatggtgattggagaccgcctctcatccacttatttccaagagaacaagcgtccgttccacaatttcggcaaccggctggtccgcggttccatcaacggcctgttcaatgcgaacgtcaccgacatcatgaccggataccgggcgttcagcttcacgttcgtcaagacctatcccgtgctttcacacggcttcgaggtcgagaccgagatgaccatccactcgctgaacaacaacctgcggctctacgagatgcccatccagtaccgggaccgccccgaaggctcagtgtccaagctggacaccgtaggtgacggcatcaaggtcatgagcaccatcttccgcatgattcgcgaatacaagcccctccccttcttcggcggattgggcctaatcatcggcatcgttggcattgtgctctgcggcaccgtcaccttcgaattcgccaagaccggcgtggtcacccacttccccacgctgatcggcgcggtgatgctggtcatcgctggtcttctgctcatcatcgccggtattatcctggatgtcatggccaagaatgaccgcaagactttcgtcattgacaccaacaaaatcgcatacaacaagaggcactgacagcgacgtactaaaagatgggggcgcaaccgtgagtcgcgccccatcttttagtgtcagcccaaaccgcaaaatatgaaggtgggcaaatcatttacctggtatctgccatgttttcttgaacgtcaacaatgacacccccactcatcttcagctggctcgaccacacactcaatacgcgcaccaacctcaagcgcataatcggtatccgtccacatacgacaagccgattgaatcgatataccgttcttcctcccctaccattaagcatcctttcggagtccctcattatccttttccagccacaggtaccacaaatctctcataccttggataagcaaggatatttcccctctgatttggcacgcatcaaaatgcctttccaatgggaggattcgcgcatgctgtacgggctacagatgattgacatggctcttttcatgtgtagacgtgcgagcggcatcgacagcgccaagaaattaaatgacggagacaaagccgtgctaaaaatcgttgatgttattcgccctccatcataaatgtggacacgggttcaaggcttctcatcagatgaagtcatgctcatcaaacctacttacgcaacatccaacgccgggcattagtaccgttgctggaatagagctgaacgttggcaccattaatggtggaaccgttctccaaatcatacgtctaggacccttccagaactgccttcaaatatcgctcaatcaccaccaacacctcatatatatagtgggacatatgtctgatgcttccgatgcctctgatgctgtttctactccttcgaccgtgttctcacgagtggcggcgagcgctgcgtggaagcggctgaaccgtttgatgccggccttggcatgtcgaaattcacgttcaccccgcttctgctgctgggattcctggctttgataccgtggcatagcgccgtatccgaatctacagccgtaccttccgtagcagacgctgcacgggcttaagcaccacggtatcggcaatcaccgcaaatagcagcgccgccagcaacgtagcgccaaacatcagcacgctgatacccgcatacgaccatccgtccgtaggcacgggaatcctcgggccaatcagcaccttggacagtggcgagtgcaccaaataaatcgtgtaggaatatccagccagccagataatcgccttacgcacccgcgccgacgtaatgtgcacgtcgtaccggaagaacaggaacgtcgccattaccaccatcgcgaacgcaaccgtgaccgtgcggccaacctgcatctgctggccggcgaacagatatggcgtggcgactgtccaggccagggcgaatggtgccaacgcatacacgccgcgccgtatacgcgcggacggcggatagtattccaacacgaatcccaacaggtagtagatcagcagtccacgccaagggaatgactgcaggaacgtcaacggatatccgacaagatcgcatatatgctcggcagcggccacggcggcggccagcccgaccagcaaccaggctcccgatcggcctatcgtacgcatcatcgcggccaggaacggcgttgccagcacaaacccggcaagcatgaacacgaaccaatagacggaatcgtcatacccggagaacagatcgaacaacgttccagacacagcgccgccaaccgaacgatgatcaatcaccaggtaggcaacgaatcccatgccacccgcatacagcagatacggcacaatcagcgagacaaagcgtttgtagtagtagcgcgcgtacggcgcgaggctaccgggatcggcttggcccgcaccgccgcctgcccgggcatcagagccagagcccggcagacggcccgctgagtgggtgctcaccggccggtcggcatcgaatgtcaggttgaaccggcccgataccataatgaacagcggattgcagaccatgaacagcgcgaacagcacggatcgcgtcacttccgcgctgccggcgagggtcatcttgacgggcatgtagttgttgatcacgtggacgccgatgaccagacacatcgccaccacgcgcagcagatcgtagttcacgtcgcgcggcttgccggcgacgccggaaacggaatcgggcatggtcatcacatggatcccgccagggacttcagatcgaccgggcagctgatctggctcttcaacttgtccaaggcgtccaggccggccgagggatcggaggacgcgtccttatgcgcgtcgttcttaccgccgtccgcgccgccgtccgcgccgccgtccgcgccgccgttcttgtcgtcgttcgcaccatcggcgccgttcgtatccgccgtgcactcatcggtcacattaccgttggagcccgtctcgacgccatccgcattcaccaccggcgtggttaccacgttcagtggatgtgtggcatcgctgctgacccgaacggtataagcaatcgtcaattcttttccgggctcgatccactgctggttgaacataatgtactgacggtcatacaggctcgcggtgttggtaccccatgaatctatatcagcctgcacagcggtgatctcgccaccgtacggagcggtaagcaccacgcggtacaacatgccgccgagcactggattctccgagccgccattaacgaaatcaggcaacgattcggccttagccttagtcagcgtgttcttcatggtgaaggtgaccgtgtattcgtcaccgagctgatcttccgtaaactgacccagatgcgtgttacgcacggctgtcgtgatgcgcttatccagcacgccagaatacagggcgttctggctggctgaggcgtcgccgcaggtttttgtgaccgtggtggaggtcttcagataccaatcctgcttgccttgctgcagctccgaaagatagatgccggcttcgggcacctgactgtcagcagacaactcgccactggccttatcgtcgataagtccggtggcaatcagcgcctcctgctcatccggatcagccatccatagcttgaaatgaccgctagcgctggtatctctaattgccttcaacagcggggatgcggtagaggcattcgcgttgccaagcacatggttcataattgcttgagccgcttcggaaacgaagttgttctgctgctcgaagtccgggtaatccgtgtacaggtctgaagcgaagaacggcaccgtggtggtgctatccagcactcggccgtccgaaagcttgacctcgcctgtggctcccagcaatgcctggagaaatacgggatcgagtgacaatacacccgctacgttctcgtcttcgttgcctttctgatacagccacatgtatttgttcatctgtgccacacgctggaattcggggtcgatggtcgtggtggccgggtactggtcaaaagtgccaccaaatacctggcgctccttcagcaccgtatcatccattggctcctcaggaatgtcccaaccagaagtggtggcgaaatcaccgatggtaatcgtgcccttatctgccgtgattgcggcgatggtacctaccatgccgcccgccgaacgtagctcggccgagttctgcaccatcaccaaatacgtgcgcttgccgtcctcgccaagcagttgcggtagcaagttaatgaggccatcgtattcgccgagcatcgaatccacggtcttgagcgcagccttttcggtttcgagcacggtggccaccttggcgacgctcggagtcggcaccttgttgagcttggtgagctgctgcgagatatccttatgcgcctgcttgacgatatccggcatatccatcagggcgctgacgtccaccgagccattcttcagggagaagccctgcaatcgtttggacaggttcagcagatcagtgaacggaccgttgaccagcgtatccacggaagccagcatttcgcgggcggcggtgatgtcgcttccgaatcgcgaatggtcgcggaagaagtcccactgtgggccgttcagctccgcattgagatcattggtggcattgaccagctcttgggagatgtccgacagactcttatcgctgccacagccaagtgccgaattggccagactttcggcggatgtcagcacgcgctgcgcatccgtggccattctcgagacggatgccgcgtagagcgtgcccacacaggtgacgctggccagcaacgtcagcagcagtacaaccaccactcgcgcccatatcggcgtacggctgatcagcgaacggccgttaccacccacgtgctggggagtcttcaggtttacgggacccgtctgctgattcacagcgctattcgtagatgcggagcgattgaattttccgttaccggcatgacgtcttctcctacgccccacagccttatggctcgaatgccctgaagtgaatcgcatacttaccctgcccgaaaatctgctcagctcatactcttatccagcggcgcgaggccacgcttccggatgccggactccgggcaaatccggaatcgcagacatgccggagcacacgtgacgccacgcatatctcatgccagtgtaccgatgccaccgaaatagaccgaggatttatcccatactgggtgcaaatccccgcatgaccaccacatcgctgtcagaatgttctcagacttcattgaggggtataacagtattgcgcaagaaaacggtcactaaacgcaacaatagttagagccgtattgatttgttcggcttaggagaacgggagaggtaattacatgttcgtcctcagcaacgcctggcgggccctgacacgttctaaaggacgtacggccctgaccgcgttcatcaccttggcggtcaccttcggcacagtcgccggactggccatcattcaagaagataccaacgcacacaccaccgcgtacgatcagcagaaggccacgttggccattcgcccgactgcggctacgtggaagaaggtctccgctacggactcggcttccaccaagcattacatgacgtggacctcatacaccgaatacgccacgctcgtccagtcggccaccaactcgttgaacttcacggttaccgaaaccgtgccggcccgcgtgagcggtgatttgaaggccctggacggcggatcgctgggctcggcctccgatgacgagaccggcggccagctcatttggcgagccttctggaccaaggattccgccaaggccagcgacctcggcaccttcgaaatcgtggacggcaaggacctgagctacaacaaccagtcctccaacccgaacaccaccggcgcactggtctctgaagcgtttgcctccgccaacaacctgaaggtgggcgatacgctcaaggtggcggccgcctcggacgccaagaccacggccaaactcaaggtgcgcggcatctacaagtacacatccgaatccgccgtcgccaatccggtgacggccgcccgcaaccgcgagaacgcgattttcaccaactatcagaccttcgccaaggccggactcgacccacagtccaccgacaagaccgtctccggctgggcagtcccggatctggacgtggtgttcgacgccggtgattccgctacatacaagtccttggtatccaccctcaagaagtccaagctgcccgccaagggttacgagttctcttccccctcgctggaatcctacaacgcttctctggagccgctggatacgctatcctcgcgcgcgaagaccggcaccattgtgttggttgccgtgggcggcgtgctgttgctcatcctcgtgctgtcgggcgtgtgggcgtccaagcgtgacgacgagatcggcatggcactggtgtccggcgtcactcgcgggcgtttgggatggcagttcatgctggaagtgttcatcgtcaccctgcccttctacgtgattggtctggtcggaggcgcgttcgccgccaatccgatcggatctgccctggcatccggccatgccaccccggtgacatcgggcctgatttggaccatggtctggtatggactgggttcaatcctgatcctggcgattcttgccgccctgcgccttgcgttcttcagcgcgaacaagctgtttgccgccgatggcgactggggcaccgtgagcgagaccaacaagacgaccaccacaaccgacgatgcggaggcacaggcatgagcgacaggaacaacgatcaggaactcgagaagaccactgacgcaacggctgacgaagcgacttctgagactgagacgaacgacgccattgaatccgttccagctgactccatgcagttcagcgtgaccttcgatgacgttgatgacgaaggcactgttgacgatggtatttacagcgcactggcatctgccgaaaccggagaaaccgacgagaccagcgaggccgaagcagacgccatcgcttcggccaacgcatccgccgaagtgaccgagcgcaatgccgcccgcgtcaacgaaacactccgactggccaaaaccgatcacaaagacgcattggccgagcatgcggagcctcagggcaaagcgtccgaacccaccatgacgctggcctcacgtatcgatcgcgtgttggtgggcggcggttccgacgacattctgctcaagacctacccgaccttcgccctgaacaaggtgacggtcgccggacccaagggcaaggtcaacatcctcgatggcgcgaatttcttctgctattccggacacgcatacgcgctgctgatcagcgacgaccccgattcgggcatcaccgccgacgccaaacgtcgcgcgctgatgggcgtgatgagcggtttgaccacgccggcgtctggcacggtgatgaacaagagcgccaacattgttgagctcgagcccgtggaactgcgcggccaccgtctgggcatcgtaccgcagctgcacgccgtgcagccgaagatcgacgccgaacaaaacgtgctgtacgccatgaatgcgtccaaccgcaacttcctgaagcccaagccggtgatcgcccgcgaactgctggccaaggtcggcttctctgaggccaccagcggcgtggctgtcggcacattgcctttggtgcagcagcgtttggtggccatcgcccgtgcaatcagcaccgaggccgaggtgctgatcctcgacgagccgacacgagggctgaacgcggatgacgaggtgaccgtgttcgccgcgctggccaagctggcgcacaccggtgacccgaagcactgcgttatcgtgctcactgcgtcgcgcgagatcgccgaagcagccgacacactcttcgaaatctgatgttcagaccatagagccccctgtgattcgtattgccgaatcgcaggggtttttcaatgctgcggctcattgccgcgctaatctgaggataaatctgaccgtacgaggcgaaacctgataattatgaccggatatattcccacactggagcagatcgacgaattgcaccgcaaaatcgcgccgtccaaggcggcgtacgagctggtgcacacgcattgcgtgattgtggcgaccatcggctgccagatcgtgcgccggcagaacgcgctgttcacgcgccgctgcacattaccgaaggacgcggaggtaccgcccaccgcaggcgtcaccggcggccatgtgccgccgcgtctgctcgacgagcatttggtactcatcggcggactgctgcatgacatcggcacctaccgcgtgttcaagcatgacggctctgacggcgaaccgctcaaattcagcaagaaacgctacattctgcacggtcttaagggctacgagtatctgctcgacgagggcgtggacgagtccatcgcccagttctgccgcaaccataccggcgtgggacttacgcgcgaggatgtggtgcgccaggagctgccattgccaccagccgactatgtgccgatgaatctcgagcaggaagtggtgatgtacgccgacaagttccatagcaagtcagtgccgccgaagttcctgcaggtcgaggcgtatacggcccgagccgagcgatttggcggagagaacaaacagcgatggctggatctggtggccaagtatggcgtgccggatattccggcgttggcggagaagtatgggatgcggatgatttgaggctcaagcccccctcgtcagagacggcttatgaagctatttcagatggaacggagacggtaggtgccgttgcggttggaggcgatgatcatctggtcgttctccagcacgttccagccttcctgctcatagccggaagaggagaccaccacaccagcggagtcgccgttgtcgtcgcgcagctcacggtagcgcatcacacggtagtcggcggcctgctcgcaacggccgtactcgtcgtagatttccacgatgcgcgggctggtcttctcacgaccggcggcgcacagggcgatgagctggtcctcggactgaatcatgcagttgtagctggacttcgggtaggcttggcgcagttcgcgcacggcctgggccacggcctcgtcgagcgagaagccgaagccgatgtattccagaatcaccgcgaagaagatggcggagtcggaacggccgccggtggagaggagcacgctgtggttcaccgggtatgagcggttggtgacgatgttgcggccattggcgtccgagatatcgccgttgtggatgaagctcaggccgttcgcatagaacgggtgctggttctccatgatgagcggcagattggagcttgccaagcgcaggtgccagatggcaccgcgagacggttcgtcggccagcgtctcaaacgtgctgtcatgacgggccgcgatggtcgacttgtagattcgggtgccggtttccggggtgggtgcgccaccgtcgcgcacgtgcggtgcttcggcgggatcggaaagctgggctacaccccagccatcattgtggatttcagacagttcacggaaatcctcgacattgtcttgccccaacacggcgttgagactcaggttgaagcctgccgtcgcgtatcccagtaatctgcacatggtatttcaacttaccgaaaccgtgtggcgacgtgcggcgaccgttataggcattctttatagagcgcatcagcgccgctgcaaactggtatgttatcgcttctgtttggcggagcgctgaggcttggcggcgggtttgccgttctcggccttgcccttatcgcccttatcgccctgctcagcgggcgcatcggcggcagcggcctcagcggtcttccgcgcctcggccgatacggcggcatcgagctcctgtaccaatcgcccaagcccggacgtggtgtccatcgggtcagggacggcggccgggtcggccactgcacgagtcggcgtgggcgtcgggatggtcttggccgtatcggtgcgcttcagacgcggtgggcggcgggtggagacgaacagcggctgcacctcgaccaacgggttgtaaggtgccagaccgaaccacttaaccggcgagccggccatgtggcggattgcgtacttggcttgcaacgacagggcaccgcgtgcggaaaccttggattccggcatcagggccttgtgaatcagcacgtaacggatggtgccgatgtccggatcggcgtcgaccttggggtaaatcgacttctgcttaggcagttcgccggttttggacaggtcgtgcatgatctggtggatgtacgccgggatggactgcgaaaccttgaatcccagacggaagcgcacgcggtagatgtagttcgtgccgaagtcctccaccgagtattcacgggtgaacggctcgtcggtggtttccacgctgactgcccaccaagcacgggcgcgcttggggtggtcggcgaagatggagaagaagatgtccgtgtcgagtcgcttggtctccgagtcggaggtcaggtacacgatgttgtccgcaaaatacgggatgcggaaatcactgtgcagcttgtcgagcgcgggtaggaagtcgttgggccgcatgtgacggcgttgcgcacgttcgagcttggtgccctcattccacgtgtacatgacgaacagaatcgcggcggtcagcaacatggtgaaccaaccaccatgcaggaatttggccatagacgcgatgaagaacatagcctgaatcgccaagaacagcacggtgaacacgatggcaccgacccgcttgccggaatgccataggtggacgccgagcaacacggtggtggtgatcatcgtaatggtcaacgccagtccatatgcggcagagatgtgttccgaatccttgaagatggcgagtacggccagcgtggagacgcacagcacgccgttgaccaccggaatgtacagctggccacgcgtgcgggccgggtaccgcacctgcagatgaggcatccaattgaggcgggtggcttcggagaccatggtgaacgcgccggtaatcagggcctgggaagcgatcacgccggccgaaacagacagaatcacggccagataacgtacgttcggagacatcatctggaagaacgggttgagtgactccgtcgcagtgtattgcgggttatcgctattggccagcatccacgcgccttggccgaagtagttgagcaccagcgcaaccttgatgaatggccaggtgaagtagatgttgccgcgccccacgtggcccatgtcggagtacagcgcctcggcaccggtggtcgagaggaacacggtgcccataagggcgatgccggcagcattgtgcgggctgaacaggaatttgatgccgtacaccgggttcagggcctcaaacacagaccagtcgttagagagattcgtgacgcccacgatggcgaggaagccgaaccagaccagcaccatcgagccgaatactttgccgatgctttcggtgccgcgcgactgcacggagaagagaatcacgatgatcacgacggtgatcatcagggtcaggcttgggttttcgtcgaacaacccttccaatggcggcagggtctgcaagccttcgactgcggaactgatggaaaccgccggggtaagtaccgaatccgcgaggaatgccgcgccgccgagcatggcgggaatcgcgagccatgcgccgtacttgcgaatcaacgagtacagtgcgaagatgccgccttcgccattgttgtcgatgcgcatggcgatgagcacatatttgacggtagtgatcagcgtaatcgaccagaagaccagcgacagcatgccgagcacggcctctcggtctacgccgccaagccctccctgaccggcaaggaaggtctgcgcggtgtacaagggcgaggtgccgatgtcgccgtacaccacgccgagcgccacgattgccatgccccaggtgaccttgtctgggctggattgcaggcgggcccaccatcgaccgaggccgcctttcgaccatgcgctggcgattttctcggcttctttggtttcagcttccctctgcttggcgagcgcctcgcgctcctccttggtgagagtgcggcgggacaccttgggagcgttggtaaaggtgtcggccctcagcagtgcttcttcttcctgtcgggccttggctttggcggcgccagactgggctttctgggcctttaaggctttttgggcgcgtgcggtcctttggttcgactcagccatacgttcagtcctccattgaggtggagatcatccccctcgcttatgtcaaacacatcatgatagacctcgttcacaattctgacaaattttacaagtcaacacatcgtctctacacgcgccgcgacggccgcacacccggccctcacagtccgtatacggcgcgggcggtatcgcgggtgccgcgcgccacatccgcgatgggcaagtcgagcgtgtcggccatggcgcgcagagtgtagggaatcatgtacggcgcgttggtgcggccacggtacggcatgggcgtcagatacggcgcgtcggtttcgaccatcgcatggcccagccccacaatccgtagcgattcgcggataccgtcattgcctttgtagctcacggtgccggagaagctcagataccagccatgttcgcgcgcgatctcggccatctcacggtcgccggaatacgagtggaatacggtgcgttcgggcgcgccgtcggccagcagggtttcgatgacctcgcgatgggagtcgcggtcgtgaatctgcatgggcaggcccagttccttggccaaggcgatatgcgcgcggaaagcctcgcgctgcagttccttggcaccttcgccggtgcggaagaggtccatgccggtctcgccgatagccaccacttgctcggggtatgtggtggcgaggcgatgtacttcggcgagcgcgtcctcgaaagacgtgtcatggtaaggcttgtatttgaggggcagaccatccggccccggcacaccacgatgcccgtggagcacggactcattggggtgtattgcgagcgccgcgtgcacattacccggatgatcgagggccatctggacggcggtcatcaggtgcggcagctcgcaaccgcagtcgataatacccccaatgccgacagattgcgcctgcgccagcaattggtcgacgtcgtacaccgggacttcgggctgtcccttctcctgcgcctcatggctcatagcgcgcgcgaaagggattacggaggccacgtgagtgtggttgtcaatggtctgggcgtcgtccggcaatgcttcaggtgccggggcccagctacggtcgcgatggtggtgcttgctcatggtttctcagtgtaggctgtttctcagtgtaggctaccgccagcaacgctcgtaaggcagtccggtaagacgttcgactacacgacgggtatcgtcggtcacgcccgcctgaacttgccgtttcttgccacgagcgcaacattcccgggagagtagcgcaaccggcaagcgagacggtcgccatcctgccgcctttttctgcatcatcagcccattttctgcctcattttgataaaatatgaggcagaaaagttcgtatgatgcagaaaatgaggcagtatgagatcatttgactacatcgaatcaggtaagacgttgctcaccccgcacaccacgagtttgcttgccgctattcacgaggcaaaagggcgtcaaagcatacagacaacgatcagaccggatatattggggacgctggttgccgtcgcgcgcatccaaagcacagatgcctcaaaccgcatcgaaggtatttctaccagcgatagcaggctcaacgatctcgtctcggagaaagtcacaccgcgcaatcgcaatgaagaagaaattgccggttaccgtgacgcgctatcggttattcacgaaagccacgactatattccgattaccccgaacgtcattcttcaactgcaccgcgacctcttccgacacacaccactgacctttgcggggcatttcaaggacagtgacaacgtcatcatcgaacgagatgcacacgggaccagcaccgtgcgattcgccccaccgtccgcacttgtcacaccggaactgatcgaacgcgcgtgttccgcctacacgcaagcaatccgagatggacataccgatccattgcttgccatcgccatgttcattctcgatttcacctgcatacatccgttcaatgacggcaacggccgcatgagtcggttactcacgctcctgatgctgtgccgcaatggctatatggtcggcaaatacatcagtatcgaacaccttatcgagcaaagtaaaagcacttattatgaggcgctggccgcaagcacccaaggctgggacgacaacgccaatgattatgcgccattcacgaactacctgcttggcatcatactgtccgcgtgcaaggaattcgacgaacgcatcaatctcacggcaggcggcagagcgcagggagcaccgcgagtagccaccaagggaacgcggattgaagcactgcttgatcaatccctagttccactctccaaggccgatattctcgctcgcatgcccgataccagcaccaccaccattgagcgcacgctgaaatcactgttggactccggtacgatcatcaaaatcggtgctggccgcagcacccgctacgtgaaacgccgctaaacgcaccatcgtgcgcaacattcccgggaaagtgttacgaatccacccacacaggcccaatctgcgacacaatcccgggaatgcgtcgccattccaccgcggaccgagtttggtcatgccgatgccgaacagcggcatcagcggcagcgaaatcgccgcgcaacccagcaacagtgaggcgaacgcagccgtatgattccagtcgtacaccacgaagaacacgaaggtctggccgaatatgtccatcgagacctgcaccaatacagtatttcaacctaagacttaccaaaagacctttgcggggagcctcgttgcctcaaccggagaatcaccaaacttcaaccacatatttcacatacccacaaaaggccgccaccgcgggaggagccacggtgacggcctgccccggcgccctgtacaagcggcgccggagacggtgatgaaaggaaggagggtacgtgtagtaagtgaagcgaacgatcgcgcggaccggtgcggacaggagacgaacagactcagccggccgcagccagtccagccagtccagccagtccagccggcccagccagacacaagccagcccacccggcccgcgcgcgccgtttacttcatgccggtcatcgcgatgccttcgacgaagcgcttctgcacgaagaagaacacgatgagcaacggcagggcggagatcagcgcgccggccatcaccacgccgtacggcgtgacggacgaaccgtgaccggtcagcatggccagaccggcggtgatggtgcgggtctccggcttggaggtcatgatcaacggccagagcaggtcgttccagttgcccatgaagttgaacatgcccacggtcaggatcgccggcaccgcgttcggcaggatgatctgcgcgaaaatgcggaactcgcccgcgccgtcgatgcgggccgcgttgtcgaggtccttcgggatggagatgaagaactgacgcagcaggaagatgccgccgacatcggccatacgcgggatgataatgccgaggtagctgttgacgaggcccatggagccgaggagcttgtagaccgggatgagcagcgccatggccgggatcatcatggtggcgatgagcacggcgagcaggatgccgcggcccttgaagtccacgcgggacaggccgtaggcggcgagcgagtcgaagaacacggagatgatcgtgaccgcgccggcgaacacgatggtgttgagcagctcgcgcccgatcggcaggcgctggaacaggctcgtgtagttgtcgagcgtccacgcgctcggaatgatcttcggcggccaggtctgcgtgacggcgttcggcgtgaacgagacgatcacgacgatgatcagcgggaagatcatgaggaacgtcaccagtgccagcgcgacgtagctcagcgtcaggctgatggtgcgcttggcgcgcgcctgcttgcgcagacgttcgttttcggcgttgatgcgagcgttttcggattcctgttccgcggtcagtttcatggaggttgcggttgcggtgctcatgcgatctcctccttctcatgcttgttgttggtgtacagctggatgaggccgacgatgagcgtcatgatgagcagcacgtacgacagcgcggacgcgtagccgagcttgccgttgccgaacgcctcggtgtagatgcggtacacgatggtttcagtggagcgggccgggccgccggaggtcaggatgaagacctgatcgaagacctggaaggagccgatgaggccgaagatgaccacgtaattgaaggtcgggcggagggccggcagcgtgatgtagcggaacttctgccatgcgctggcgccgtcgagcgaggcggcttcgtacagttcggcggagatgccctgcaggccggcgaggaagatgaccatgaagtagccgaagttcttccacacggtgatgaagacgatggtggccatcgacgtttcgcgtgtaccgagcaggtcgaggtgcgacggaccgccgagcagcgagacccagtacgggatgagaccgagggacggggagaggatgaactgccatgcgatcgcggcgatggtcagcgagatgacgaacggcaggaacatgcaggtgcggaagaagccgacgaacttgaggtccttgcggttgagcagcagtgcgaacgcgagcgcgatgatcacgacgatcggggcgtacagcaccgcgtagacgagggtgttcttgacgtcggtccagaagtcctggctctggaacagcgtgatgtagttctggaagccaatgaatttggcgggtcggcgtgcgttggaattgatgcggccgttggtcagggacgtgatgaacgtctggatggccgggtagaagacgaagatggcgaggatgatgagcgcgggcgcggtgaacaggacgccggtgcgcaggttgcgcgcctgaatggccttcttgttctccttggcgacctcgtgcgcttcgccttgcgacgttgctgtggtcattttgctcctccaaaaggacacatgattggttgtcgggaatggaaacgttccccttccctttcgggaattggctgggaaggggaacgtcggtcagctgctgtcagctatgtgtgggattggattgcgggttgccgctcactactcggcgtactcgtcgaggtagcccgagatggagctctcggcctggtcgagcagaccctggatgtcgtcgccggtgcggacggtgttctgggtcagggtgtcgagggaggcggcgatgtcgccgaagccgcccttgaggccggcgatgccgatgtaggagttgtcggtgtactgcgagatcttggcgatcagcggacggtcggacagctcatcggcggtgacggtcttgttgttcggcgggtaggcggagccgagggaccacttcacctggttgtcgtggttgttgtagaacttgaagaactcgtagatgccgggcagcttctcggagtcgccgacctgcgaggtgacccaccagtacaggccggtggagccggtgttggagccggtcttgccgtcggcgtacttgtaggtgccgtcgccgtccggaacggcgaaggtgtcgtggttgatgcccttgtcggtggccgcctggtcctcccacgggccgacgatcaccattgcggactggccggactcgaaggattcgcgggccgcggtgtcgtccagacccgggacggcgtagccgccgttgtagaagtcacgcatcttctgcaggaaggccttgttctccttggagttgatggagaccttgccgtcggtggtgtacaggccggtgccgttgcccttcatgtaggcggcccagccggagtcggccatcgcgaggccgtactgcgaaccgtcggacttggtgagcttcttggcgacctcgaggagctggtcccaggtggtcggaatgtccttgtcggtcaggccggcggccttccacatgtcggtgttgtaccacacggaggtcggcgcgtagcccatcggaacggcgcacttctcttcctcgccgtcgatgttgaaggtgatctgcttgacgacgttgtcgaggtagtcgccggtgccgttgttcttgtcagcgtagaaatcggagacgcactggaaggtgccgtcgatggaccaaccctggccattgtcggcaccggtggtgacgaagtccgggccgtcgccggtggtgaccttggtgaccatcgtctcgccgatggtgctccatggctgcagctgggcgtcgatctcgtacttgtcctgggacttgttgaagtcgtcgacgatggattccagcgtcttgccgtcggcttcggagaagccgtgccacatggtgatcttcaccttgccgtcggcggtcttctggacgtcgccgctgcctccgttgctggaaccgcagccggccagcgccatgccggccgcaagcacggccgccgtggccgcgacgaggttcttcttgatcttcattggtttcctccttggtactccggtttcccagaaatcttggtcgttgcatgcgggcgaccctgtggtccgccgtctggcgacggtgttcggttgacgacaacatcgttgtgcaacttgcgtggttgataaaccttggttcgtggagcctcagcgctcgtttacaacgttggaattcactataacacgttttccatcgttgtacaaatcggatgcgcaacccgttcgacacgcctagaaaaccgctgttttccgtacgaggcgccggacttcacatcgatgaaaccgacgtttcacacacgtcgaatgttctgttatgggattgatggacgacggccgtcgcgcgaacgtcgcgcacgttacgcatgcggtgcgcgtgacctgcgcgacatgccgcaccacgaccgccgctgcgtacgactacgcctctgcggccagcccgaccgccggggtgccggctttcggaccgccgtcgggcggcagcacgtcggtcgtgacgggcgtccacaggttgtccggctcaggcacgccgaagccgggagtgccgtcctcgttccagcgcaccacgccgacacgggcgtgacggttcgggtcgaacagcggatcgcctttgatttcggtgtagttgcgcgcgtggtagatcatcagatcctcggagtcatcctcggacttggtgaacgagttgtggccggggccgtactggccgttctcggagcaggtcttaaacaccggcaccgggctcttggtccagctcttcggatccatgaggtcgctgccacggtcggcggtcagcaggcccaccgcatacggcacgccggtgccggacgcggagtacgtgatgaagatcttgtcgtcgtggaacaggaacgccggaccttcgttgacgaggaagtcgatgcactcccagtcatactcgggcttggtgagcatcaccggatcagcggccagcgtccacgggttcgccatcggagcgatgtacaggttggagttgccggggatgtcgtagtccttctgcgcccagacgaggtactgcacgccgtcgatcacctcggtggtcgcgtcgagcgagaacgagtccatcggcgtgacgatctggcccttctcgacccagttgtcggtggtcgggtcggcatcggtgttctccagcacgaacatgcggtgggtgggcatgccgttcggctcgaactcgtgttccgcgccggcgaagtagatgtaccacgcgccgttcacgcggtgcagctcaggagcccagatgtacttgctgcatacgccggactcatgcttgcgccagaccacggtctccggggccttctgcaggtcgttgatcgtcgaggcgtgacggatggcaatcttgtcgtactcgggatcggatgcggtgaaccagtattcgccgtcgaccttaagcacccacggatccgcacgctggagcacgatcggattgttgtaaacagtcattgtttttttccttctccaatccaagtggctcagtatttacatcgatgcaatatagcagatgtacaacgatgtaacaactcggcgtttcccgcccccgccaacgcacactccacccaacccaaccatccctctcatcccccccaacggacatacagccgattccacccacaccgcccacatcacccgcaccacccacaccgaattacaacgttataatgatggtgcgcaacgatcagcgttcatcattcgaagcgaaggagcatcatggacatcaaaccgtgggaatacgccgattttccagccttcaacgagccggtccccggagcgacgcgtgtccccaccaccggcgacgagatcggcgtgacataccatcccgacgtaccctacgcaaccgccggaaccacgaccctgcacctgcagatcctcgtcccgcagacccgcaaccagaccgacgccaccacctacccgtgcatggtgcacgtgcagggatccgcctggatgaagcaggaccgaacggcactcgtccccacgctcagccgcatcgcggagcgcggcttcgtcgtcgcgatcgtggaataccggcattcgggcatcgcatcgttccccgcgcagatccaggacgcgcgcaatgccgtgcggttcatgcgcgccaacgccgcgcaataccatgccgacgccgacaatctgttcctctcgggctgttcgtcgggcggtcaggtcgcgctgctcgcggcggtcgcgcatgccgccgaccgtaccgacatggacgacacgtcgctgtcgctggcgccgaacgccgccgacgtgtcggatgcgacgcggggcgtgatcgactatttcggcgcggtcaacggtcagatggacgacggcttcccctccaccgtcgaccatcatctggccaccagtccggaaggcatgatgatggggcacgtcgacctgcgcgatcggccggatctgcgcgcggcgatgaccgtggaatcctatctgacgccagaactggcgctgccgccggtgctgatcctccacggcaccaaggatcggctggtcaacgcgcggcagagcgcgagcctgtatcggcgactgcgagacgtcggcaagtcggccgaactgtatctgctcgaaggcgccgatcatggcggcgcggaattctggacggacggcatgtgccgcgttgccacggacttcatgcgctccaactgcgcgcgttgacgctcagctgccgtacggctgcgcggacattcccgtacgaacgtacgacgacgagacgacggcggcagtgcggtgttcgtccaaccggtgccgccgccccgaccggctcggctcagagcgtgcgggtggagctgcgcacgaccagcgtggacgacaccttgcggaagatgggatccgtcgagtcgccttccagcggcggctgcccgtcgatgcggttcttcagcgcgcgcaccgacagccgcgccacggcctcgagccccggtgcgatcgacgtcagcgccggcgacaggtactgcgaatcgtccgagttgtcgaagccgatcaccgaaatgtcctcgggaatccgcaggtcgtgcatctggatcgagtgcatcacgccggaggcgagcatgtcgttgagcgccaccacgccgtccggccgtacgccggagtcgagcagcgtgttcatcgccgccacgccgtcgttgcggtgccacatgatcgacggcaccacgagcgccgggtcgaacggcacgccggcctcctccagtgcctcgcggtatccgcggaatcgcaacgcggccgagccgacctcctcgcccgggtgcacgccgaccacggcgacgcgcttgcatccggtctgcagcaggtacgaggtggcgcgcttggcgccttcgacattctcggtggcgatgtggtcgaccttgtcggtgaagatgcgttcgccgatgagcaccagcgggtagtccacctcgacttcggccgcatcgtccggaccgagttcgagcgggctgtagatcaggccgtccaccatcgcggtctgcgaaccgtgcagcgcgtccagctcgccttcgcgcgagtacaacgttggttccacgatcacacgcaggccgagctttttcgcctcggtgatgatcaacgatgaaagctgcgcgaagtacgacagctgcaggtctgggatggcgagcgcgatgatgccggtgctgccgcgacgcaggttgcgcgcggacacgttgatgacataaccgagctcgtcgatggccttgtgcaccttcgcacgggtggcatcggagacgaattcgtagtcgttgaccacgttcgacacggttttgatggaaacaccggccgccttggcgacctcgcgcatggtgacgacgtgatcgccgtccttcgcggttgttttcttgaccatgggtaatcctcagtattctgttctcggtaaatagcggcttacgccacgtactgcactgcacgttggcggggccagaaagccgaaccccacccccgttcgccgccgtatggcggctttaccgcacggcgatttccatcgttatcccagcataagccggattgagttcctcgtcgcgctgcatgtcgaggatcggcatgccctcgcccgaccagtggacgcgccgtacctgcgcgtcacgcccgccgtatcgcccgttgtcgtactccgcgttgtggaatacgtagatcaggttgccgccctcgtcgtgcgaccacatgccgtggccggtgcccagctgccattcaccgttgtacatgccggatttctgcagcgggtagtcgagtttcgtccacgtggccgggtcggtcaggtcggcgcgcacgccggccggcgcggtgaccagtccggtcgtgtagtcgatgccgacgagcgatccggagtagatcaggaagatctttccctcgtgcacgaacgcgttcggcccttcggcgatcatgttgtcccacgcgaattccggcacgacgatctgcgtcggctcgccggtcagccgcgtcggccggtccgggtcgaacggcgcgatccatacgctgccaacctgctgccacgcgtagtaccagcggccggagtcgacgatcacggtcatgtcgagcgagatgcgctgcaccgggttgaggatccgttcgccggggccgaggatcggctcgggaacggtccagttggcggggtcgcgcgggtcgaggtcacggccgtcggcatcctgcctgagctgcatgatatggcagcgaccggtccacatgtcgggtttgccggcgcggtcgttcgcggtgccgtccggatcggcggcggggccgtcgaagcacggcatgaacagcacggacagcttgccgccgatcacgtgcagctcgggcgcccagaagcagccggtcatcgcgcggccttcgctgttgcggtcgccgcgggtgagcaggtcgatttcgcggtcgcggccgccggcggcatccgacaggtcggcgatggacgtcgccacgcgcagcggcatgtgcgtgcggccgccgttcggatcgacgcagttgccgtcggtatcgtcggtggcaatgaacatgaagagttgttcaccgttgtaattccatgcgaacacggacggatcggcgcgttcgacggcgaacggcacgggatagtcggtctgacggatgcgaccgcggaccgtacggcgttcgcccggcttgagcctgccagctgcggcgtcgtcggcgagggcggcgagctgtgcggcgtcccagtcgacggcgcgcatggcggtggatccgtcggagtactgcagtttggccgtggtgcggccgagcgagccgatgaggtcacgggcttcgccgtcgtacagatcggccgagacggtcatggacggcacggtgacgccggtgttgtaaacgcggccgaagcgtgcgatgagcgtcgcggcttcctgttcggtgatgtcgatttcgttgccggggacggcgtccgcgatgccgtagtcgcgacggacggacgttgcgttgacatcgttggcattgcttgcggcaatcggttcggaggtatcgtccggttcggccggcagcgtggtgccgaccgcggcgatgatgtcggcgcataccgcgcgcatcgcgtggccgtcgtcgtcatgccaccggatgacgtaccgacgttctgcatcgttgtatatgaccgtgggacggtgtacgccggacgtggggccaagcagcaccagtccgcgctgatcgtacgacgtcaggtcgcggctggtcgccagcaggaacgccgaccgttcggatccgtccgcgccgccgccgcgcgcggtgcgggtcgccgccacggcgaaccggccggacgccagccggaacaggtgcggatccttgaggcttttgagttcgatgtccacgccgggcatcgccgcgccgtgcgcgacggcgtcgctggcggctcgcaccgtcgtgtacggatcggtcttgaatcgtgccgccgcggtgcacgcacgtcgggattcgggcgtcgccgcggcgatcggcacgccggcagcgaagaagatgccgtagttttcgttaagcggcgtccacgagccgtcgagatgcgaccgcagcgccaggtgcatgctgaaggcgatgtcctcgttgttcgcctcttcgcgcgacgtggggacacgcgtatagcacagcagtgagtaggagtcggacattccttgtccctttcggttcgacaattcatttacgtcgatgtatagtatatcccagtttacatcgttgtacaaacgcagtgctgcacaacaccactgtcacacacaggaggaacacatgaccctcaccggcaccctacgcaaggcgttcgccaccacattggcggccgccgtgctcgtcggcacgctggccggctgctcgtcgaacgccaactcgaacgcatcgtcgaacgccaagaactccagcgactccagccagaccagcgccaccgagatcaagcgcggcgaatcgcacgatccatccatcgtcaaggccaacggcaagtactacatcttcgggtcgcatctcgcctggctgaaaagcgacgacctcgtcaactggaccagcttcaaaaacaacctgagcaccgactacgagaagatcttcgccgacatctggaccaactggtcgaagcaatccgccaacccggacgtcaagggcaacatgtgggcccctgacgtcatctggaatgcaacgatgaaaaagtggtgcatgtacatgtcgatcaacggcgctaactaccgatcggcaatcgtgctgctcaccgccgacgacatcgagggcgactggacttacgtcggcccggtgacctactccggcttcgaaaaggtcaacgcctccaagaccgacgtctggaaggtgctcggcgaaggcgccgacctgacgcggtacacgtcgcagaccgacaccggcatcaacgcgatcgacccgtgcgtcaagcaggacgacaacggcgacctgtggatgacgttcggctcatggttcggcggcatgtggatgttcaagctcgatccgaagaccggcctgcgcgactacagcaccacgtaccagacggtcaagaaccagtccgacgcctactacggcatcaagctcggcggcggtttcggcaactccggcgaaggctcgtacctgctgcataccaacggccactggtatctgttcgcatcctacggcaacctgcagcagaccggcggctaccaggtgcgcatgttccgcgccgacaagatcaccggtccgtacatcgatgaaaacggcaacgccgcagtcagcgagcgcgccatcggcaacaactggcagagcgaggtcggcgtgcgtctcatgagctcgatccagtggagcggcaacgacaactcgcacatcgaagtcgcgcagggccacaactcggcgttcgtggacgacgacggcaccacgtacatcgtgtaccacagccgcttctccgacaccggcgagatgcaccaggtacgcgtgcgcgagctgctgccgaccgacgacggctggctggtcgccgcgccgtacgaatacaccggcaccaaggccgccgacaccaagtacgacgcgaagaacgtggccggcgactacgagttcgtgatccacgaccagaggacctcgttcaagggcccgaagaaggtcaccgacaagcacagcaccgactaccgcggcgtcaacaagccggtgaacatcacgctgaccgaggacggcaaggtgaccggcgacaagaccggcacgtggaagctcgacaagtccgacggcaccggcgacatgaccatcacgctcgacggggtggagtaccacggcgcattcgacaggctgccgcgcgacaaggacgaccgcaaggtcgagatgacgttctccgtcatcggcgacaacttctgcgcctgggcctcgcagaagtagtcctttctcattgccgcccttccctcgcgccctcgtcctcgcccttccctttgaaccaccccatttctcttaacggacttacagccgatttcactggtgaaatcggctgtaagtccgttaagagaaagacatcatgtatcacaaagaagctaacccatgaccgcaaccacctccacgaccgaacccacgaccgaatcgcccgccgatgaacgattcgtcgaacacccgctcgccccgggccgcatcgccatccacgacccggccatcgtcgaggacaacggtacgtactacgtcttcggcacccaccgacgctgcgcccgcagtaccgacctcgtccactgggaacgcttcgagaacaatctgacgcgcgacccggcctcgctgctcggcggcatctgggaggcatggccgaagcagccggagaaccccgcgctcgaaggcaacacgtgggcgccggacgtgatctggaacgacgtgatgcgcaaatggtgcatgtacctgtcggtcaacggtcacgaattccgttcggtgatcgtgctgctcaccgccgatcgtctcgacggcgactggacatacgtcggtcctgtcgtctactccggtttcaacgttgacaatgtgggccgcaccgacgtgccacgtgtgctcggcgacgaggccgcgcatggcgatctgtcacggtatgcatcgttgaaggatacgcggatcaacgcgatcgacgccgcgccgatccgctgcgatcacggcgaactgtggatgagtttcggctcgtggttcggcggcatctggatgttcaagctcgatccgaaaaccggtctgcgcgactacagcgtgcgctatccgctcgtccacgattccgccgacccgtactacggcgtgaaggtcgccggcggctactggaactccggcgaaggctcgtatttcgtgcaccgcaacggctggtggtatctgttcatggcgtatggctggctcggccgcaccggcggctaccagatccgtctgttccgttcgcgcaacctcgtcggcccgtacgtcgaccagaacggcaaccccgcgatttccaacggtgaaatccccgacaatcagaccaaggacaccggcatccgactcacgtcgtcggtgaaatggagcggcggaccggccgacgacgatacggtcgaagtgtcacagggacacaattccgtactcacgcgcggttcggacggccgactgtttctcacgtaccatacgcggttcatcgaccgcggcgacgaggattacgagacgcatgtgcgcgagctgctgccgaccgcggacggttggctgacggccgcgccgtacgagtatcgcggctcggcagccgtcccgccgaccgccgcgaacacgtccgatccgaccgtcggcgacgacgatgacggcttcggcgattacatcgttgcacccagcagtgcgccgaacttggccgcccggctatgccactgcgtccgccccgtacacgaatcggatctcgcacacccatcgctggtgtccggcgactacgaattcgtacgtcacgatccgcacgcgtatttcaacggcacgcgcaacgcggacggcacgtggcatggcgtgaatctgcccgagacgatcacgctgcagccggacggccgcgtgaccagcggcggcgtggtcgacttcttcgatacgccggacgcgaacctgccgcgatcgaccgacggccccgtgtcgcgaggatcgtggcggatgctcggcgcgacgccggccggcgtgcactgctgcgacagcgacatggcgatcacgatcgacggcatgacgtacaccggcgtgttcgccgtactaccgagggagaccgatggccgggcgacgctgacgttctccgcgatcggcgacaatcaagcaatctggggcgcccgcatcgagggctgaaacccccttctctgttcccttccctctgacggacatacagccgatttccgtatccgaatcggctgtatgtccgttgagaaagcgaggggaacgatatcaggctgcacgacggatcggcacgttgatgctcggcacggttgcagccgcaacgggctagagctcgacttcgggcttggtggggtcgtccttggtgcggcgcttggcctcgtccggatcccacgtcacatcgtcgtagtaccgcttccactcggccccggcaaccggcgcgatcgccgcgaccgtccttactgaggattccggggcatagccgtcacacgtattgcgcgcatcaccgagcggaatgattgggttagcctcgtacggcaagcgtggtgaacgaccaagcaggagcggtgtatgtaccgtcagcaaggttgacttcgtgcgaggtggggcaagtcggtgattcctctccccgaatccctgcatacggatcgttgccggtaagcacggttgcctcaactacagccttggctgaatcaggcacattcagcgcagcaagcacctgagccaagtccacgtctacggattcaggcagcgcgttgacaacacgcaagtaagtcacgccagccgtcgaatcgcgggatacagtgacggtccggcgcggctcgtccggtgtctcatggccgtcggcgaccagcgcgccgtcgatgtacagtcgcatctgctcgccgcgatcgccaatctcaatgcgcacatcccacgtggttccggggcgtaccgcgtccattgaagtttccgtgccggcgagtgcataaccggtgccttcgcgcactacttgcacgctgaatccacggccaagcgaagtaccgttatagttcttgccgtttacgtcgccggacgcgattcgcacgccccacatgccttcgtaataggtgactttcgcgcgaatggtgtatgaatcggccgtcagaccctcaggtaccggaagagacaccggcccattgccttggtagctcacgtccggcagatcgatatgcgtgccatcggccgtctcgagagagaagtcggcgaaatcggcgtgggcgccgccatcgatcttcaggcttacggtattcggcaagtcacgacgcaacgtggtgggtccgtcaagcgagaccggccaagcggtgtccgcggtggtggtggcgtacatctgctgcacccagtagctgtacgggcggtagacgttctcattgtcaaagtagatgaggtccggattccagctggtatggccgttcttggcaaatagcggcgcgtaggacgccatgtgcaccacgtcgccgttcaattccatgcggcccatgaacgccgcttcggacaagccgttgatgagctgggtgtcccaggagccgtattcgccgaggtaggccttcgggcccttgcggtcggtgtgatcgtagtggtcgaggttgtgaaaccaccagctggaggactggtaggaatgctcgtccacaatcggaatgccggcctcgcgcgcatacgcccaaccttgctcgtagtcctgtccgctcggcgcaggcccgaccgtgccgaccacggtgatttcggggtgcgcggctttgacggcgtcgaaaatctgttggaagcggttcttgaacacgtcgtcgatcaggtcctcgttgccgatgccgagatactccagattgaacggctcgatatggcccattgcggcgcgcttggcggcccacttgttggtggccgaatcggcgttgcagaagtcgatgaggcccagcacttcgtcgatgtaagcgggcatgtcttcctgagccacaggcaccgggccctggctggtgttctggcagctcatgccggccggcagcacgggcagcggcttggctccgatggcctcgcacaggcgaaagtactcgtagaaaccgatacggaacgactggtggtagccccatacgttgaagttgtgcgggcgatgctccaccgggccgatggtgcggtcccagtgatacatgttgttcaggcccagtccgtgggtgatgcagccgcccgggaagcgcatgaagcgcgggtgcaggtcggccagcgcctcgaccagatccgggcggaaatgcttgaggcccttataggtggttcgcggttcgaggctgacgaagtcaaggtcgatggtgccgggttcggggaaagtcaggcggagagcgccttgggtggcgatgatttcggcgttgggttgcggggcggcctgtgcgctagcaatagtcagttcggcgcggagctgggtccattcgccgcaagcattggaggcgggtgcggtcacgacagtggcagcgagcggcttgccatcatcgccaatcagtgcgacttgcacgggcagcgctttgccgtgggcacgggtccagatggaaaaatcgtaggtctcgccggcgcggaacaccatgccgtcgaaaccgaggttttccagagcgggagctgcgggggtacaagccgaatccgtctgggatagggccgaatcggcccgagacacagccgagtcagcagtctgctcgccgcccaccttgccgatttcggcaatcgcgtaatgcgggttctcttcggccaccggcgcggtcttccccacaccgaatgcggcgaacgagccggcgggcacgatcttgcgccaagcggtgtagttgctccactcgggcttatccgcacggttgtattcgaacgcgccgttttgcacgagttcgctgttgagcccgccatcgcccgaatagctgatgtcttcgaagaacacgccccacaggtccgtgctgatcttgcgtacaccagctttgtccaatgtggctaccagtttgtctgccatcgccaaaccactccccagatttcacccgcgtgcagaagatgcgagcatcttctgcacatcaaatatgtaacggtacatattctaaactatctgccacactcagcaaccccgtgccgacttcagcgcgtttcgctctatttcaacattttccagaacgtattccaatcacgactgcatgtttttcacacgtaccgttacatatttcacagtgtttatcgttaccgataatgtcatcacgaaacatacctaaagcaacatctcgtcactcttccggcgctccactggccacgcgaatcatcgcgtactgggactcgtagaggcggtagtacgcgcccttggcggcgagcagctgcgcgtgcgagccgtgctcgacgatctggccgtgatcgatgtagaagatctcgtccgcgttctcgatcgtcgacaggcggtgcgcgatgatgaagctcgtgcgccccttgagcagatgctgcaggccggcctgcagcgcctcctcggtgcgcgtgtcgatgttgctcgtcgcctcgtccaggatcaggatacgcgggtcggcgagcagcacgcgcgcgaaggcgatgagctggcgctggccggccgacagggtcgatccgcgctcctccaccaccgtgtcgtacccgtcgggcagttccatgatgaactcgtgcgcgtgcacggccttcgccgccgcctcgatttcctcgtcggtggcgtcgagcttgccgtagcggatgttctcgcgcacgttgccggagaagatgaaggtgtcctgcagcatcacgcccatctgccggcgcagcgatgcgagcgtcacgtcgcgcacgtcgtagccgtcgatcgtcaccgagccctcggacacgtcgtagaagcgcgacagcaggttgatgatcgtcgtcttgccggcgcccgtcgggccgaccagcgcgatcgtgcgtcccggttcgacgtggaagtccacgaggttgaggatgttgcggccgtccttctcgtagcggaacaccacgtcgttgaagtcgacgcgcccgcggatctgcggcaggtccgccgcgtcgggcttgttgcggatctccggcgtgacgtcgagcgtctcgaagatgcgctcgaggtacgccgagcaggtgatgagctggttgtagaagttgccgatgttgatcaccggattccagaagttgttcgcgtagccgacgaacgcgatgagcacgccggtggtcacgttcacgcccccgaagcccatcacgccgacgaagtagatgaacgagatggtcatcacggagatggtctgcacgcccggccacatgaggaactggatgtgcacggcgtgcatccacgcggaacgcacctcgccctgctgttcctggaaggtcctgaactgggcctgctcctgcgcgaaggtctgcgtggtcttcacgccggcaatcgactcgtggatgtaggcgttcaggttgctctgcttgttggagagcttctggaaggcgcgccgctggaagatctgcagcacgcgcacccagatgatgagcaccgggaacaggatcaggctccaaagggctagctgccagtcgatcacgaacatcacgatcagcgtgatcacgaaggtgaacacgtcggagatcacgttgatcagaccggagctcagcgtgtccgaaagcgtgttcacatagttgaccacgcggatcaggatcttgccgtgcgggcgcgaatcgaagtagctgaagggcagcgtctggatatgcgtgaagatatcgcggcgcatgtccttgagcatgagctggccgacgcgcgtgatcgccaccgtgcggtagcgcagcccgaactcgtacagcacgatcagcgcggcgaggatcacggcgaggatgccgagcttgccgaggtccttgttcgggatcgcctcgtcgatcatgatcttggtcaggtacggcacggcgacggcgatgcaactcatcgagatgacgacgacgagaatgcgcgccacctgtgccatatacggtttgagatatttgccgacgcgcaggatgtcccggaagttgatctgctcctcgagttcctcatcctcgcggtatgtattgcgttgtgccataagtcctcttctaaaaaccttgcgcgacgccggactggagtccgagctgcttgtggtagatgtcccagtagcggccgtgtgcggccacgagttcggcgtgggtgccgcgttcgacgatacgtccgtgctcgagcaccagaatcaggtcggaatccttgaccgacgagatgcggtgggcgatggcgacgatggtcttgccgccgtccatctccttgaggtgcttctggatctccgcctcggtctccatatcgacggccgaggtcgtatcgtccataatcaggatcgacggattgtccgcgagcgcgcgggccagcgacaggcgctgcttctgtccgccggacaggcccacgccgcgttcgcccacgacggtgtcataaccctgcggcatcgacctgatgaaattgtccgcgccggcgatctgggccattttctggatatatcggtcgtcgctatcaccgctggcaccaaaaccgatgttgccgccgatggtgtcggagaacaggaaggtatcctgcgccacgatgcacacctgcgagcgcaaggtggccagcggccagtcgcgtgcgtcgatgccgtcgatgagcacatggccaacggtcgggtcgtagaagcgggagatgaggctgacgagcgtggacttgcccgcgccggtttcgccgaggatgccgagcttggagccggcgggcacggtgaagtcgaggtccttgaggatcggggtctccgggtcgtccgggaaggcgaagctgacgtggtcgaagcggatgtcgcccttgatgtgcagcgggcagaacttgcgttcggtggactgctgggcaccggatgttccggaagccacgggcgctccggtagccccggtagcctcatcatcgtgcttgacttgctcgacgatcgtgaccgcctgcttgacggcttcgaccgcgtcgggcttctccacgatgcgcggctgttcagtgagcagcttgcggattttgatgcagctggcgttgaatcgttgccagtcgttgatcagccagccggactggcgcaccgggccgtcgatcatccacaggaaggagttgaaactcaccagattgccgagggtcatgtagcccttgatgaccagaaagccgccgaggccgagggtgatgagctgcagcgagaagccgaggccgtccagccacggcatgtacttgcgcgagttgtaggccagggccatgttgcgctgcatgtaatcgtcgttgtgctcgtcgaatttttcggtctcgtacggttcgcgcacgaatgccttgatcacacggttgccctcgatgttctcttcaaccatggagttgagggaggccagcgagttgcggatggcgaagaacagcgggtgggcgtgcgtggacaggccgcgcgtgagcacaaaaatgaacggcgtgacgcaggccaggacgagcgcgagtcgccaatcgatggcgaacatcacgcacagggcgcccacgaacatgaccacgcagtcggcaatctgatagctcacccaactcaggcagtggcggatcgcgtcggtgtcggaggtcaggcggctcatgatgtcgccggtgcgtgtgtggttgaaatacgtgaagtcgagttcgtgcagcttctcgtattcgtcggagacgaggcggtagaccgagttctggccgaaacgctccatccacatctggtagccgtatcgcgcgcccacgcggatgatggtcatgaggatcatcagtccacacaaacgcggcagttcgtcggcatgtccgccgacgatgacgcggtccacgatgataccggacagaatcggaatggtcagggccatcgtgttatttgcgatgaacagtagaagcgcgcctaccacgcggggcaggtctggtttgcagtatggcagcacccatttgagattgcttgcgctggtattgattcccggatcgacgtacatgtgaggagatcaccgtttcttggggattgtttgcttgtggtatggtgcggcatgctcctgcgccgcacgcggcaatcgctgccgccgcgattcacgatcagccgtgcttcgcactgcgcctgtcattggccgcatgaccgaagctctccttcatcggtcgaagcacgttcgactttcgcaaacgcgtactagtctaggcgacctgcgtctaatcgcaacggcccgcaactctgcgtgttccccgcattagcaacgatacgcggctctctaagcgcaacattccccggaatgcgtcgctgcacacctccgaacaggtccaattcgcaacgcattcccgggaaagtggcgcatgtcatatcacgctcaaacaacccagcatagtgagtggttcattcacgttttacgtattgtgcgacggaatcggcatctcccgcaacacgtgagatatgcaaaagtgccgcacgctgaatggtgatcagcgtgcggcactgcgcgaaacgcgtgaaatccgcagaacgcacgaaactcacgaaacagataaaacgtacaaaacgcaagcaaggcgaagcaacgaacagacagagacagacagactacaggtcagaacgccagcgaacgcacgtaggaaccaacttgcgggcggaacagctaccggggattgttcgtttgcgatgttcgcattcatggcaggtttctccatacgattcgggcggtcggttcaggaggttggttggcggaggcaggttcggtttcagcgtcggtccagggccacccagagcacgccgtgcggcggaatcgtgccggtgatgacgcggtcggcacccacgccttcaagacgcacgtcggcgggctcgcccggcgcgtcggcatacagatcggcgagtgtccaatcgtcattgcgggcgtcaagccccacgatggattggagctggatgttgcggccgatctcgtatgtgtcgctgccggtccagaacagcgcggcgtaatggccgccgtgatgcgcggaacgtgtgccatcggcccaatcggctgcgtcggcggaccagacgatgaactcgccacggtaggtgctctcatcccaccatttgccaaaaatccgttcgcgcacggtctcgcggttattggtggagccggcaagcacctcacgcaacgcgggattctgcagcagcgcgatggcgtcgctgttgctggtgggcagatcgccgccgaccataagcgggctacgccccatgcaccatagggccagcagtgtcttctgctcgtccagcgtaaggcgggattggcggtcgtcgccgcgttcggcgcgcaggcctatgtgcccgaacggcaccatgtcggcgtcggcccagtggccggtggtctggaacggcgcccagcgggccaggcgggcgaactgctggtagatgtcttcccaacggtcccacagatcgtcggaaatacgccacatttgggcgttctcgcgcaggaagtcgacgtagctcgtcgccacccagccgccgggcgagagagacaggtcaatcgaacggccgtatttggcttcggctttggcgatggcgcgatgataggcggcgatttcgtcggagtggaacggggtctgcatgtcgtcgaccttgaggaagtcgaggccccaggaggcgaacaggtcgagctgcgcgtcataccaggcctgcgcgcccgggtgggattggttcaggccgtagttgtccggattccacttgcacacgtggtcgaggtcggccacgtccttggcggtgtagttggtgccgtatacgggcaggttcttgtccacggcgatacgcgggatgccgcgcatcatgtgcatgccaagcttcaagcccagttcgtggacggcggcggcgagcgggccgaatcccttgccgccggcagcactcgggaaacgcaccgggtcaggcagctgacggccgtattcgtcgagaatcagcggcgcgttgtcgttgtaaccatgtgcgcgggcggtcgggtcgtaccagtcgatgtcgatgaccagcgtatcccagccggcgtttttcaggtgttcagccatgaaccgcgcgttggccagcagctcgtcttcggtgagggtcgtgccataggaatcccagctgttccagcccatcggcggacgccatgcctgaggaaggctctgcggaagatccgtcatcgtatcctgctttcgttgatattcgcataagttgccctacggcggtatgccagccgcaaaccaatcggcatcgcgcacgtacggataggtgaagagtgacgccactcccccggagagtcccatcccaacgtacgacgaacttcatggcctcttggcacaccgacgtatgtaccgttacatattcttccaccggaacgatatcaagcaagcgcatgttacgctcggcgcgtcatcgcctaagcgcagcattttcagcgattccggcacacagccaccatttgccaaaacacgatgttgtgaataccgttacaaccattggaagcattacgggcatgatccaatgcccatcacaggcgaaacatgaggtgacgttatgccgagcggcaaaccaacattgcgcgacgtagcgaaagccgccggggtctcccccatgaccgcctcgaatgcgctgcacggcaagccgggtgttaaggattccacgcgcgccaaggtgctggcggtggccgaaaagcttgattaccgcatcaatctgacggccagcatgctgaagtccggccgcagcaacatcatccacatcatcgtcaacgaattcgattcgccgttctactccaaactcgtcgaatcgctcgtcaccgaaaccaccgagcgcgggctgacgccgttcgtggagcaaacccggtactctccggatgccgccaaacacgcgctggccaacaacccgttctccgggcagttgttcgacggcgagattatccacgcttcgggcctgaatgccggtgtgccgctttccgcgatcaaccacggccgaccgctggttctgattgacgcctgcgaggaaacgcccacgttcgatacagtgaatttcccgaacgaggacggcgcgcgggcggcagtgcagcatctcatcgaatgcggatgccaccgcatcgccatcgtcggcgacgggtattcgccacgaaccgaactggcgcacgtggaaagttccagcggtttgcgcctgcgcggggccagcggcgcactgcttgacgccgggctgccgtatgacgaatcgacgaacttcattggttacggtagcgacagcggcatcgaagccggtcatgccatcgccgaggcgatgctcgaggctcgtgcgcaatcggctgatgacactgctgagtcccgttccccgggcaccacgcgggcaacgggaagcaccccggccatcgatggcatcttctgcattaacgactatgccgcattcggagtaatccgaggccttgccgactacggcatccgcgtgcccgacgatgtgagagtcatcggcttcgacggcgccacggccggctcgtacaccacaccgacgctgagcaccgtccaagtggatctcgatcagctcgcccaattcgcgcttgatatgatcacccgccgcgtggagcagcgcgaccagggcgacggcaggtccgacgaatccgctggcatgccggccacgcgcgccaccattggatacacactggttccgcgcgagtccactgtcggttcggcaaacaggtaacgctgaaacgccgaaatagggcggcgattcccgactgccgcgcccactgcccaagtgccgtgcagcgtgacgtgcgaggtttcggcatgcgtcaaaccgttcccagcgctcccacgtggtagtggcgcccatgcgcacttttcctagggttaggaccatgaccttccctaatcacacggtgttgtagaggcgggcggggaaagcgtcgcggtattggccgggggtcaggccagtgcggcgcttgaagacgcgcatgaagtacttgggatcggcgtagcccacttctcgcgcaatatccgccacgctggaagcggtagaactcagcagttcgcgcgcacggtcgatgcgatattcgatgatctgctcggccacacccacgccgaacacgcgccggtacatcgcggtcagatagctgggtgaatagtggaagcgcgcggccactttggccacggtgatgtcgtcgaaggcattggccataatccacgagcggatggccagcatcggcgccaggccggacgaatcgccagcggcaccggccgaatcgacatgcatggcccattcctgttgctgccggacgcggtcggcactggtgatgggcttgccgtcgccccggtagccggcaagcgtacgatgggcggcaaagtccgccttcagccgctcctgcgcgctgacctccagcagcaggccggtggcgaagtaatcgcagtaagcgttggaatacgggccgaatcgcgcatagatgtcgatgagctgcccacacatcaccgccagccggtcggggtcgggcagggtgcgttcatcgggcagcagcaggcaatggtcgccctgcggcagacccgcgtcatcggggagcatgcgcgcatccggcaatttgaaatgcatccagtagaagtccacgtcagacgtgatgatgtcggcgcccgcatgctccacattcggcggcaagagtgcgatttggccggcctcgatatgcagggtctgctcccccacccgcatcggcaggacgccccgacgcacgaacatcagctcgaaggtgtcgatggtgcgccgcagatggcgccagcccggtccggacacaaactgcccgaccgagtaaaagtccaccggcccttcgagccgacatgtcgtgatgcccatggctaccagagtagccgagagcaaatatcagccgcgcagccagacggtcatttcgttttcgccgcggttggcccaggcgaagtacgggatgagcgtggcggtggcgggctcgcgcttgaccggcgcgtacacggcgtagagcggcgcgaacgccggaacctcggccgcgccctcacccgcggcggccacagcagccggcaacggctcgcgccaagccggcacctcaagcttcaccatgcggcgggtcacgtcttccacctcgccctggcccttgtcgtcgatgcccttggcgccggcgtggaagtcgaactcctcgaccttggccgcgctcgggtcggccagcagtgcctccacatccgcgtgcagcaggtgcaggttggcgccgttgtctttttcctcggcgcagaaggtgatcgggccgcgcacgaacgccaccttgccggcgtcctcgcgcaccagcgggttggcggccagcatacgcaccggcatcgggaagtcgaacgtcacggtgtcgccgtcgcgccactcaccggtcagatacaggtagccgtcgcgaatttcgcgggtcacgcgggaactatcggccccagactcagactcgcccgtggccgtaatcgcggcggcagcagcggactcatcgcccacccaaccgggcagacggaaggccagcgtaaagcgagcaggagcctgagccgaggtgccagcagcgtcaccgcccaagcgcacgaccgccttgccatcgccttgccacggcaggttcgccgtaacatccagctccacagccgtaccattcaactcagctttggccacgccgcccatatacaagtgcgtgaacagcgtaccgccatcctcggcaaccgtgtaggcatattcctgcaccgactcaacgatgcgggcgatgttcggcgggcagcatgcgcagccgaaccacttctgacgcaccggcttgacgtggcgcaggcggctgtctttatggcaggcatacggattgacttccagcgggttcacgtagaagaagctcttgccgtccagcgccatgccggccagcgtggtgttgtacagcgccgactccataacgtccgcgtactcggcctttggcgcgagctcgagcatgcgacgggcgaagaacgccagcgaaatcgcggcgcaggtctcggagtaggcggagtcgttgggcaggtcgtagttgtaggagaatgcctcgccgtccaccgtgccgccgatgccgccggtaacgtacagtttcttatcgacgatattgcgccagagccgctcggccgcatcggcgaggtcctggtcgtcggtcagtcgggccacgtccgccagaccggagtagaagtagccggcgcgcacggcatggcctacggcttcgtcttgttcggtgaccggcttgttcgcctggtgataggcgtaccggttggggtccgtgttgggtttgtagttggcgtcggcgtcgcgctttgcgttctcgtctgcctgaatatcgaagatgtacggctgccggccgcgctcggtcacgaaatattcggccagatcaaggtaccgctgttcgccggtgacctcgtacagcctcaccaaagccatctcggcaatctcgtgaccggggcaaccacgcagctggcccggcttgcgaccgaagcgctcgtctacgtaatcggcgaaacggcaggcggccttgagcaacttgtctttgccggtgccctggtagtaggccaccgcaccttcaacgaggtggccgaggcagtacagttcgtgatggtcacgcagattggtgaacgcgcgatccatgtcgttcagaatgtagcaggtgtccagatagccgttgtcgagttgggcggcacacacgacgtcgatggcttggtcggcggtctgttccagtgcggggtccgggtaatgggcgagggaatagccgactgcctccacccacttggagaagtcggtgtcttggaacacgaagccgtagaacttgtctgggtcgggattggccgggtcttcggggagcgcctcaaatccgcggaacgtgtacttcggcggcacgaacgccttgccctgggtatccttacgcttgttttgcgcggcagcggccttgaagttgtgcatgcagtagctgggggccgcgccggggacgttatcgttcagggcgttccactgatagggaatcacagccgtgcgcacgagttcctgctcggtgcgccagaacgaatcggtgacggtgacgtttttcagggccagcggcttgctatgcagcgaagtcatgacgtactcctttggactatgcgacattcgtcaacaatatgtatcggtacatatgatacgtgcgcccgcgcgagcagcaaggtggacaaatcgttggcggggtggaatcgccggcgcatatccgcccgtacgatttcgcccggtgaatcgcccgacgaatacacggcgacttatactaccgacggaccacaaacgtcgcctacatgaatggaagatcaatcaccatgacagcaaacgccagcgcacgggccatcaaacccgaacttctgcgtacgtacaccgaagacttcaacaaggaccgcgccaacctgatcgcggcggacgcggcggtttcggccggcgtgctcaaggcggccaccgactatcgcggcgtgcgtgcgctgccgcgcgacttctccatcgaactcaagcagggttcgatcaccaatcaggagcgttccggccgttgctggatgttcgcctccctgaacacgctgcgttacgaactcatgcatcgctggaatcttgaggatttcgagttctccgagacctacctgttcttctgggacgcgatggagaagtcgaacacttatctggagaacgtgctgcgcacgctcgacgaggcgaccgattcgcgtctgttcgaggccatcaatgagtcgcctgcagacgatggtggctggtggcagatgttcgccgcactggtgaacaagtacggcctagtgcccaagagcgcctacccggagtctgagaactcccgtaattccgacgatttcaagcagtacctcaactccaagctgcgcgagttcgcggccgagctgcgccgccgttcggttgcgggggcgtctgaggacgagctgcgtgcgttgaaggacgagtacatgggcaccgtgtaccgcatctgcgccgtggcgctcggcgaaccgccggagaagttcgacttcttcgcgcgccccaaggatgatgatgaggataagaagggcgaggctcgcaagtgcaaggccgaggccgacgcagacggcaaggccgaatcctgcaagtgcggcgaatcctgcaagtgcgagggcaaatccgacgccaaggcctgcaagtgcgataaggacaagtccgacaagccgaaaaccggcaaggacgagcgcccgcagattcgcgagatcggcatcaccccgcttgagttctacaagaagtacgtgccggtggacgtcaacgatttcgtgacgctggccaacgccccgctcaagaaccgcccgttcaaccagcgctaccgcatccgcttcagcgcgaacgtggccgaggctggcgatatggaattcgtcaacgtgccgctggacgtgttcaagaaggccgcgcttgaccagctcaccgccggccacccgatctggttcgcctgcgactgcacgcagttcgccctgcgcaaggacggtttcttcgaccagtccgtggtgcgcgtcgaccagctgttcggcaccgaattcaccggcgacaaggcccacggcctcgaatacggcgacagcccgagcaaccacgctatgaccttcaccggcgtgaacctcgacgaggacggcaagccgaaccgctggaaggtggagaacagctggggcaaggacgccggcaaggacggctactacgtcatgtccgacgcctggttcgaccgctacgttaccgagctcatcatccgcaaggaatacctcgacgacgccacccgcgccctgctcaccaccgaaccagtcgagctcgatccctggcagcctctcacccgccgctgccgctgacgttccgctggcgggagcatatattcgaatgccccttctctctgttctgaaccgcaccccgattgttggactggagtaattcatgtccgatgatttggaggtgcggttttctatgtcacggaaacgcaggggttcatacgatgtcgagtatatgagaatcgtcgtcgggttgattcgcgatgggatcggcgccaagtcgctcgcccgccggcttggcgtgtccaaggaaaccacgagagaatggttgctgtcataccgaatcggcggagaggcggcgctcatgggcgaacgcgagggcaacaggaaatacgattacgagacgaagctcgccgctgtgctcgaccatctggaacgtgggatgagcaggccggaggtcatggaacgttatggcatcgccagccggacgtgtctgaaacagtggtgccaggactatcgtcgcggagggccggaggcgctgcgcccgaagcccaagggcaggccgaagggcgcgaaatccaaaccgaaaccggctcccacgcgcgaacagctcctcgaggaggagaacgcgtatctcaaggcgagggtcgcgtatctggaaaaagcccgcgccctgctggcgtcgaagccgacaaccgggagaagtcggtgatcgtctcgacgctggcggggctcggccatccgctccggtgcctgttgaaaatcgcgggattggcgagaagcacctactactatctcctttcgcatcccgagccggtcacccggccggatatcgagccgatggtcgctgaggtcttccatcgcacgcccaacgggtgcggccaccggcaggtgcgcatgtgcctcgtatacgagttcggcgtgcgcgtgagccataagagcgtgctcagggttatgcgccgcatgggattgaagtgcgccatacgccgcccgaacccataccgcagatacagctcataccaaggcgatacgggcgcgaagccgccgaacctgctggaacgagacttcgcggccgaccggccgtgggtgaagctgggcacggacgtcaccgagttcagggcagcgggcggcaaggcgtacctcgcgcccatatacgacatgggatccaaggagatcgtggcctgggacgtcagccggcaccccgacctcgcccagcagcaacggctgctcgccatgctcgaggagaagctgcccgaaggcgccgatcccatactccacagcgacatgggctggcaataccagcacgactggtggcggaacaggctcggggaactgggcatccgccagtccatgagccgcaagggcaactgcatcgacaacgccgccaccgagcaggtgttcggccacctcaaggacgagttctacaccggccgcgagttcgcctcgtacgaggagttcaagagcgaactggacgcgtacatcatccactggaacaccagacgacgccagatacgactggagggacacaccccggaggaattccggaacatgtccctcacagcctaatcaggtacccttaataaaccacgtccaacttccggggcgcagttcagttcagagagaaggggcattacgttatgcgagtacgcccggccgcacctattcgagactatcgcggctgagctgagcaaaagtgccgtcatcatcggccaattgccggtaggttccggcctcgctaattgttccgaactagttatccacagagttatccacatctcccgcaagctagagccacataccccggttttcatagcgagcatgtgaccgctgcgctacggtggcgtcatgaacgacatattgcccactccaccgcccggcgtattcgacgacgaaccgtccggctggacccggccccacacaccgggcgttgcgtctgcgcgcaccatcaatcctgagctacgttcatcaccacgtatggcgagttccgcgccaactgtgattacaggccctgtgtcgccagcaatgagcgaaaccctcacccaacgtaagcgggaaatgcttaaacgatgcacggacgccgcgcaacagctcgggcaaccggtgctcttcggcatgaccacatcgctgatactgcaatccgtgccgcttcccaaggattgcgatatcgaccccgccgagctccataccgtctccgactcacaccgcacacgaatacgtgccatcgtgccgccaacgacaccacacatctggaagccgctgagcgatgcgcacaatgtgcgtatcaacaaacatgtgtacgcactggatctgatacacacttgggcacaactcgccgctcatatatcgctcgaatcgctggtcatacttggcgacgcaatccttacggcaatcgcccgcaagccgggtctggcgaacggccgcactgctgacggcatttatcaggacttcgtgcggcaagtcaccgaactcccgaaattcaacgcaaaatccaagtgcatgatcgctcttgcattcattacgccccgcgtggactctccgatggaatcaaagacccgcatcgcgacgacgaaatacgggcttccgccagccgtgacaaattacacggtgcccggcgcgacattcagcaacggtgcgccgataacgctcgatctcgcttggcccgaatttcgcgtcgccatcgaatatgacggcgatcatcatcgcaccgacaaaaaccagtggcggcgggacaacgacaagcgcgaactgctgcgacatcatcattggatcgtcatcatcgccactgccgcgaacatggccgatgagccatcccaagccgaactcgcctaccgagccgggcgacagctggcgttgcgaggcgccatattcgatttcaccttgacagcgacgccgctcaatgaacttgcccggcggaaacgacggaaatccaccggggcgcactgagctgacatcgatacgattgcgcgcgcttgctgcaacgcatatgccattcatcgcaccccatttggtcgcgtggccccgaccgcatggcactgttgtgtgtcacacgccatgttacgtccggcgaatccgcacatcatctgcgttgcgtactgccatattatgcggttcgcgatatacgtcacggtgtccgatgtcctggtaacgacgtcaatcgatttatgtgtgtaccgggccagattttgttgtcccggttctccatttcgcctctttttgagcaaccgggacagaaacaccctcgaaaaatcgccaattcggccctaccgcacaatatccgccatcacacatcggcggaattccgggcttctggatttgcatacattgagcgctcacgggatggtctgtcccggttcccaaaaagaggccaaaatcacgaaccgggacaacgaaatctggcccggttcgcacgtcaatcggttgccggcaccaccgggacaccgactgcgcatagataagatgcttcaatgcttaacaggcatgcgaccataccgcgatagcaacgtttcgctggaagtagaggaatcaagcagcaccccccaaaccggaagtatggggggactcctgcaatgctccgaatcaccgcgccccgtgcttggtgtggcggatcacggcttcgagcggcgtggatgtagctggacagcagcgtaacttgcgttgcatgatgcggcccaaaacgaagaaacccggcggagggggccgccgggtgagagagaagagagaagaagggttcagttatggggttcggaagaacctcgccaccggtatgaacttcattccgttgacatcttctatataaccgtctctttcttggggattcgatgtgcttgtctgagaaaagtcttggcaaactgtgacgggtttgtaacgccgcccgacaaccggcctcgcattgtcggggctaggccgcacatacggcaacgggccaccccgcaacacttcatgtgcgaggtggcccgtcagctacgagctagcaatgccgaatcactcggcggcgagcttggccttctcggcggccagacgttcggcttcggcggcacggcgagcagccaacgcttcatcgaagcgagccagctcctcttccacggcctcggtcggaatcttggcgaagatcggtgcgggcttaggcaccatggcgccgacctcgattgcctcgctcttccacgggtgcacgttcacaccgagctcgtaatcgccggtgatgatcgggtacgtgaagccgggcttgtcgagatcctcgacttccttgagctcaggcagcggcgagaaggtgccggtgccgccgagcgcctcccacaccttctgtgcggagtgcggcaggaacggcgcgagcaggtggttcgcgtcagacacggcctgagcggccacgtgcagcacggtgccgagacgagcctggtcgtccttaatcttccacggttcggtggcggaaatgtacttgttgatgtcgccgaccacacgcatcgcctcggacagggcgtgcttctggtggtgggtttcgatggaggagccgaccacgtcgaacgcggcggaagcctcttccagaaggccacggtcttcgttggtcatcgaatcctcgtccagcggcggaatctcgccgaagttcttgttgatgaggttggccacgcggttcaccaggttgccccacgaggaggcgagctcctcgttgttgtggcgcacgaactcggcccacgtgaagtcggaatccgaggattcggggccggccacggaaatgtagtagcgcacggcatccacggggtagcgggcgaggatgtccttgacgtagatcacgatgccgcgggaggagctgaacttcttgccttccatggtcatgaactcgctggccaccacctgctcaggcaggttgagcggacccatcgggccggtttcgccgcccttggagcccttgccgttgtacgccagcatttcggacggccagatctgggagtggaaggtgatgttgtcctttcccatgaagtagtaggccgggcagctcgggtcgttccaccattcgcgccacttctccgggtcgccctgacggcgggcccattcgatggaagccgacaggtagccgatcacggcgtcgaaccacacgtacagcttcttgttcgggttgtcaatccagtccttcaccggcaccgggataccccagtcgatgtcacgggtgatggcgcgcggcttaacttccttgaacaggccgagcgagaagttgatgacgttggtacgccagcccttgcgggtctccagccacgccttgttggcttcggcgagcgccggcaggtcgaggaagtagtgctcggtctgctcgaagcgcggggtttcgccgttaatcttggagacggggttgatgagctcgtccgggtcgagctcgttgccgcaggcgtcgcactggtcgccacgcgcaccttcggcatggcaaatcgggcactcgccctcgatgtagcggtcgggcagggtacggccggtggacgggctaatcgccacctgctgggtgcccttgtagatgtagccgttctccaagcactgcttgaacatctcctgcaccacatgctcgtggttaccggtggtggtgcgggtgaacaggtcgtagctcaggccgaggtcgcacagatccttggcgatcacgcggttgtaacggttggccagttcctgggcagtgagaccttccttctccgcctcgacgagaatcggggtgccgtgctcgtcggtgccggacaccatgagcacatcattgcccttcatgcgctcgtagcgcgcgtagacgtcggagggcacaccaaatcccgcgacgtggccgatatgacgggggccgtttgcatacggccaagcaacattcaccaaaacatgactcataaggcttgattatccggcgcggcggggacacgcccggatagctgccgcgccgccatcctcatcccactcacctatccacccgcaacttccccacatacttatctgtacacctcttgcgcgcttatccacatacgcattcgcacacgtatccgcgcacccatccgtacgcacgcccacgcacatccgcacacacttccgcctgccaatatccaccgagttatccacatcatttgcacacctagtaaagttatgcacttatccaccgttttcgcctatccggtggcgcgcaagccgcatttctgcatattgttcggtcatggatatcacagcaggtccgatgacggacatcacaacagtcgcctcgccggcaaccgcgcagcctgcggtgccgccgatactgtttaccaaggatctgccgggaccgctcagccttaaccgtctggccgccttcggcacgttacgtaagctcgacgattccgccggctactggatcgagcattcgggcacactgtatggtcgcgcgaaaatcgtcgcggaggtcgccccgtttggcactgtggtgtgttcgatgaccgccgcttgggtatggctgggaggccccgactttccgagtaccatagacgtgatttccacatcgcacttccgctcggcatccgtcagccgccgtatccgcgtattcaaaagattgacgttgccggagcaaatcatcaagctcggcgggctgcctgtcaccacgccagcccgtacggcttgcgacctggtgatgagtcctgaagacatccccgatccttccaccgtcaacgcactggtgtgtcagctgatgtccacgtaccagtttcggccaaacgactgtctgcaaatcgtcaaggagcatcggcatcacaagtacgccggacgcgcacgcatgttttttgaatcggtgcagcaggagatggacgaaccggctttggagcaatgcgcatgacgagggggttcattgtcagaggccatcgcagaggccgccatgccgctcaccgtttacggcatttgcggcaggcgcaacggttacctcgccacgcggcggcggcacactcatccgaatccgcatcgcgcgcaatctcggatatgaccgcgccgcctgaaccgcccatcagacttacgcccgcggtggcatgttcgcccgatacggatgttgccgtgctctggcacatcgcatatcacgtgcccgaactgcgtaaatggctggttgccaatcccaaagccgacgcacctttgctggaattggtctcgcagcgtggtgggcccggggtccggcaggcgttggaaatattgttcgagtcgatggaaacgtaacggggagataatcgccggctgctgcgctatcccttgattttcagcacagccgcatacacctgcttgcgattggccaacgatccgtcagccagtggatgctcctgcaccacttgcgcgatggcgtccttgatacgcaggccgtcctccaaagcacggtcgatggagagcacggccatgtcatccacgctcaacgtgctgggcgcggccgcttcggcctcctcgttggacgcgccgccgatgaccagcactatctcgccacggggcggatcatcaatcacactttggtgaatctcgtcaatcgggccgcgacgaatctgctcataatccttggtgagttcgcggcacagggccatcgggcgattcgggccgaacgcgtccagcagatcgtccatcgaatcggcaatgcgatgaggcgtctcgtagaacacgatggtgcggcgttcgggcaacagcgtgcgcagatactgcacgcgctcggaatgctttcgcggtaggaagccttcgtagcagaagcggtcggtgggcaggccggagagggcgagcgcgtcgagcacagcggaggggccgggcgcgcaggtgacgggcagaccgcgttcgatggcacggcgcacgatggccaagccggggtcgttgatggtgggcatgccggcatcggacacgacgagcacggtggcgccggtttcgacctggtcgagcaggccgtcggccttgtcgcgctcgttgtggtcgtgataggcgatgacgcgaccgttcacatagacgccgaggcgacgggcgagatcgtagaggcggcgcgtgtcttcggcggccacgatatcggcccgttccaagagggccaccagacgggctgaagcgtcgccgacattgccgatcggggtggcggcgagcaccacggtgccggcggggatggtcacggccgattcgcgggattgggcgacggcggattcgccggcatgaacttcatcattgcgttcaggcacttgcgtcacgctaccgtcagcgtcatactgctcattcaactcatctgcgcttgtcatactcccagtattgcccatgccacagagcaatccacgacaatccatggcgaaatcgaggcattctccctttgcaggggctgatttcacatgttccggaggtctacttccgtttcaaggggctcctcatccggtgaagcaccagtacaaacggctttgacgcaacgctattccgccattttggcggcgtatctacttgaccatcagcccctcgaaacgcaagtagacctccggcaaaccccaaatcagccccttgaaacgcgagatggcagaatttcaacgaaaacaaaatgaaaagaccctctgcggtggaatgaatgcagagggtctcgtggagctgacggtagtcgaaaccgcgacctcttcgatgcgaacgaagcgctctaccaactgagctacagccccttggatgttactttgctccgcaaagcaactcgcaacaatatagtacggagtgcggtcaaacgcaatttgacgccgaagtgtcgcacgcgtgtcgacacggtaacgtttcggtgtcgccggttgggccgccgcaagcgcagcatcgtcccagccgtctgccggcgcaatagctcgaactaagatcaccactccgcctggataccagggataccgcggcggcttgttcagtgtcgcagacggggcaagtcacccacaccgctccgtatggataccgcggcggcacccggcaacgccatcacgtctccagcacgcccaacaccttcttctcgttgtagaacgcgaacacgatgccgcccaagccgcacagcacggccgcgcacacggcggcgatgcggtagcccgcgccggacgccatgccgatggtggagacgccggtgaacagcagcatggccacggactggcccatcttcatcgcaaaggtgcgggccgcgtagaacatgccctgacggtcctggccggtggtcttggaactggcgtcggcgatattcgccacgatggcctgcggcaggatgccgaacgcggccatcggaatcgcgccgaccaccgagagcaccaaaccctgggccatcgccggaatgaagccgagcacggccgaaccaagggcgccggcaaatgcgaacgcacaggtgaagatcacgaaggcaaccagcagcagcctcttcttgccgaccttattggccagaatattgaccggcagatagaacagcacagagacgccggtcatgagcacgaagtagatggtcgtggtggtttccggcagcttgagcaggctggtcacgaagaacggcagaccggtctggaaggtggtgatggccacccagtagaccacgtcggagcatacgaacttgcggaattcgccgtcgccgaacgtctgcttcagggattcgatggtcgattcggaggtgggatgggagttgacgtagtccttctcgcggatggccagcggcggcaccagcatgcacacgaacgccacggcggccatgatggtgaaggtcacgcggatggcggtgatgcggcccatcatcggcacgaacgcgccccaaatcaccggcgccacgtacgcgatggccgtgccggccacccaagtgaaggagatggcggtggagatggtgagttgctgcttggagtcgtggccgagttcggcgatgagcgcgttgtacggcgtgcagtagaacgtgagggcgatgtagtagccgatcacggtgacgaacaggaacgccgcgttcacccagctggtgccgttgatcgggctccagaacacgagcacggtgaccaccgcgagcggcagggcggcgaatttcaggaacggcatacggcggccggatttggcgtcgcaacggtcggagagagacgccacggccgggtccacgaacgcgtcgaagaatcgggcgaaggcggtgatgccgcccaccacggtcacgatgccgagcacaaccaggccttgcggcacgaatacggtctgaccttgggagatggtctcctgatcgggctgatagaaatacacgagccagttggagataatgccggaaagcagcgcccagccgaactggccgaccgcaaacgcccacactttggcgatggggagatctctgatggctgacttcgccggtgcaacttgcacacccgttacacttgctgtagtcgcattgcccattctcacaacctccgaatcaacattgacacagtgtcaaaatccagtatacaccggcacaccatgcgctctacgatagtgggcatgacaagtctgaccgagcaactgccatacgtatacgcttttcctgatgcgttggggaccggattactggtgcacaccgagagcgtattggacgatgagatacgcgatcgtattggctcgttcatccatgaatatgaggttgtattatctcgattccgcgatgattccatcgtcggccggatgcgcacggccgcacatggcggcacgttcgattttcccgactgggcatcgggtctgtttggcctgtacgaccgcctgtttgcggcaaccgatggggcgaccgacccgtgcgtgggcgaggatttgattcggcttggctacgacgagtcgtattcgtttgcggctacgcccgatgccgccgaacatgcaggcgcgatccacggacgagccgtttggtcagccgatgttgagcggcacggcaccacacttatcgcccacagcccagtcgcgctcgattttggtgcgtgcggtaaggggtatttggtggatttgcttgcggggatgttgggcgatggcgcgggccaccctcaacccattcaatacgtcatcgacgccgggggtgatttgctagtgcatacggacgaaccaatcaccatcgcccttgaagatcctgccgatccggccaacgccgtaggtgcggtcgaaatcagccaaggtgcattctgcgcgagctcccccagccgccgccactggtctgacgccgcaggtcaccaacttcaccatctgctcaacgccatcgacggactaccggttgacgatgtagccgccacatgggtggccgtcacgccgccatcgagcgccataaccacgaagacatcgacgcatgccagcaatgcctcgacaacggcaaaccgcgataccgacgattcgtcgaacaccgttgcagcacacgtccctgtcacactggccgacggactcgccactgctctgttcaccacctcggccacccagttacgcgctcatttccccttcgaatgcgccatcctcaacgccaaccgcaccgccgcccaatcccccaattttccgggcggttttttcacacactaatgtacgaaatcatcagtatcacatccagtggagcattccctcgggtggaccgatgggttgctccccctcagtcagctacgctgacagctcccctcggagaggggagccgagtatagctaatccgctaatccgctaacgcaggaaacaatccgtcagtcagcaagcgcgaactggctgttgtagaggtcggcgtaaaaaccgcccgccgccagcagttcatcatgcgtgccgcgctcgatcacgtcgccgtggttcatgacgaggatcatgtcggcgtcgcgaatcgtggagaggcgatgcgcgatcacaaagctcgtacgccccacggtcagcgcatccatggccttctgaatcagctcttcagtacgggtatcgaccgaggaggtggcctcgtcgagaatcagaatcggcgcgtcctgcaccatcgcgcgggcgatggtcagcagctgcttctggccctgggagagcgacgacttgtcatcgagcacggtgccatagccgtccggcagtgagcggatgaagtggtcgaggcccacggccttgcacgcatcctcgatttgcttgttggtcacgccaggcttggagtaagcgacgttctcgcgcacagtgccgcggaacacccacgtatcctgcaacaccatggagaactggtcgtgcacgttccagcgcggcacggacttggtgtccacgccgtcaatcgaaatcgaaccgccggaaatctcatagaagcgcatcagcaggttgaccatggtggtcttgccggcaccggtcgggccgacgatggcgaccttctgcccggccttgacggaggcggagaagtcgtggatgatcggcttgcccggttcgtagccgaactgtacgtggctgaattccacgtcgcccttcacttcgtggccgcccatgtagttcttgccgagtagggcctgcttgccggattcgtcttccatctccggctcttcaaggaagccgaacacgcgctcggcggcggccgcgcagcgctgcaggttctggaaggcctgcgcaaactgcgaaagcggctgagtgaacaggcggatgtacatcatgaacgccacaatcacgccgaactcgatctgcccgtcgagcgcgagcgccgcgcccaccacgcacaccaccacgtagccgaagttgcccacgaaattcatgagcggcatcatcaggccggagaggaactgcgacttccagccggactcgtagaggtccgagttgtacttctcgaagcggcggatcgaatcggcctcgccgttgtatgccttgacgatgaggtggccggcgtacatctcctccacgtggccgttgacgtcacctagcgccatctgctgccgggcgaagtacttctgggaggacttcatgatggccatcatgatgatcaggccgatgaggctggcaccgatggcgcacagggtcatgatcacgttgttgtagaacatcatcaccagcgcgcccacgaacagcgtcaccgaggtaatcagcgagccgagcgactgccccagcgtctggccgatggcgtccacatcgttggtgatgcgggacagcacgtcgccgtagctgaccttgtcgaagtatttgagcggcagtttgttgattttgaccgagatcgattcgcgcagtcgctgggcggtgcgctgggtgacgttggccatcatccagctttgcacgtagccgagcacggcgtagcccacgtacagggccaccaaagtccaggcgatgtggcccaccgtgccgaaatctaccgagttcatcaccggtctgccgttaacgatggcgggcagacctttgacgatctcgttggtcatgtccttgagcttgtccgggccgacgatctggcagacggtgccggccgcgcccaggatgagcgcgatgatgatgacgggaagatagttgcggcaatagttcacgagcttgcccatgactttgccgaaatcatggggctcttcgacggcacgcctgccgcccattggtcctcttggcatttgttttactccttaaaagtccgtattgacctccctctgatgaaggaggtggcgcgaagcgccggagggagagaagccgtacgcgactacccctcagtcagctgtgctgttttattcgctcgcttatcagctcgtcttcgcctgggaacagcccactgggctgttccctttacggctcagcccctgacatggggagctaccgctgccgcccccctacgccgtaagctccgactggctgagctgggattcggcgatctggcggtatacgtcgcagttgtcgagcagttccttgtgcgtgccctgacccacgaccttgccgtcgtcgagcacgacgatgcggtcggcgttcatgatggtgccgatgcgctgggccacgatgagcttggtggaatccttggcctcgcgggcgagcgcgtcgcgcacttcgcggtcggtcttgaagtcgagcgcggagaacgagtcgtcgaaaatcaggatttccgggtgacggtacaccgcgcgcgcaatcgacaggcgctgcttctggccgccggacacgttcgatccgccttgggcgatcgcggcggaatacccgccgtccatgcgcgccacgaactcgctggcctgcgccacgtcggcggcggccctgacgcgattcagctgctcggccggtatatcggcaccttccgcggcctcgccagcggcgatcaacgcggcctcgcgcttgcgcccggccggggtggaggtatcggccatctcgacctccgccgggtcgcccggctgatcgccgtagctcacgttggaggccacggtgcccttgaacagcacggactgctgcggcacgtagccgatcttgtcgcgcagggccttcaggtcgtagtcgcgcacgtccacgccgtcgaccaacacctggccttggctggtgtcatagaagcgcggcacgagattgataagagacgacttgccggagccggtggagccgatgaacgccaccgtctggccctgctcggcggtgaagttgatgccttccagcatcgcctcgcgcgaatccgggtaggtgaagctgacgttgcggaattccacggtgcccctctggccggttttggccacgtcggcggcggttttggtgccgttctcgacgattggctcagtgtcgagcacctccatgatgcgctgcgcggacacgtcggcgcgcggccagagcacgaacaccatgctcatgagcaggaagctcatgatgacctgcacggagtagttggagaacacgaccatgttggagaacacggtgagcttgtccttgagcccggcggcatcgatcaggtaggtaccgatccagtagacggcaagcatcagaccgttcatgatggtgttcatcagcggcatcatgaacgccatgacgcggttggtgaacagctgggtgtcggtgaggtccttgttggccttggtgaatttggcttcctggtagtcctcggcgttgtaggcgcgcaccacacgcaggccggtgaggttctcgcgggccacgaggttgatgttgtcggtcagggcctgcatggccttgaatttcggcatgaccatggccatcatgatgacgatggccgccagcagaatcactacggcgattccggtggcgagcgtccattcgaagccttcgccggcgatcttgcacacggcccatactgccataatcggcgatttgacgatgagctgcagacccatggtgatgaacatctgcacctgcgtgacgtcgttggtggagcgggtgatgaggctggcggtggagaacttgctcatttcggccgggccgaaggactcgaccttgcggaattcgagcgagcgcagacgctgggtgaacgaggccgccacgcgcgcagcgatgtagccggtgatgatggcacacgccgcggatccgagcgagatgagcagcatcttgccgccggcaatccaaatgtccttcatgtggctgcccggcgtttcgaccagcgtggtgatgtctgacatatagtcgggcagtttcaggtcgaagtagacctgcccgacgatggtcaccagagcgatgagcatctgaccgatctccgctttggagaggtatttcatgatgcgaagcattggtttccccttgtgttggttgggttggttattggttattgacgattggttcttaagttggctgggttatcggcgattatcggttcacgatgtcttaatagtttctattgtttgattacttacactgtgagatattacgcgcacttctgcatgttcgctgtgagcgtcctcaattagccttgccgattagttctccgcgcgcttagctgccatgtgttcagccacgcgcttgccccgctccacgaatgcctcacgcacctgttcagccgtcggccgaggccgccccggatggcaaatcgacatatatatggtgaactcagacaccaggtcaacgaattcgcgcgtgcgccgctcccccatttgcgagaaaatccagcaaattgcggaacgcatttcctctatcatccgatgagactgctcgcgcccggaatcagtgagattcacgcgaataatgcgccgatccttggaatcaatgtcacgcgtgacccagccttttttctccagagacgacagcacagtggagatgcggccggaactggcctgcagcgccgatgccaattgcgatggcgtttgcgtccccttcatggacagctcccggagcacgaactgctcaccatgggctccacgagtgaattccctctgcattgtcgaacgattgccccacacgctggcatacagttcgctaactgcttcctgctcaaatcccataagagcaccatccattcccattcgccacacggcagagcgccgcaaacaccccaagaatatctcacaccgtaaacaattcattactagaaactatttttggaacgcataatgcacacactccacgctctttgatattctgaaagccgcatagatattcacttcggggcgtcgtctaagaatatttgctgggccaacggtagcgacgttggcattgtgctccatgaggtatctggtcgaaaaggcggacgaagacagaccagttgggcggagcgcgcccatacttcaaaaccattgcaattattggctttgaccattttcgtggagtcacgaaaatggtcatgaaaaacataaggacacacccatgaaccgcgacgaaatcacacgcaaaaccagcgaactcagcactatcgcacacaccaccgaggactccaaagttgagtattggtatgcacgcgagctaatgacctatatggggtacgacagatgggaaaacttcagcaaagctattacacgagccaagcaagcttgcgacaattccggcgtatccgttgaatcccatttccgtgacactacgcgagacgtgactctcggcagcggtgccacccgctccatcgcggacgtcaagctcacccgatacgcctgctatctcattgctcaaaacggtgatccaaagaaagaagaagtggcacttctccagagctattttgccgttcagactcgcaaaacggaaatcattgagcaacgcatgggagaaatcagccggctcgccggccgagaggcccttgccactgcagagaagaaactctatccgtatacccaaatcacacacaacaaaaccgcacaagagcacatgtacacgcccaaccacgccgcagaacgccggcaaggatgtgatacaggccacagaaagcgttgtaccgcctaggcaatgcaacaattgtccgctatgctctgaaggcagatggcggcacggatgccatcccaaagagggggtatgaccatgattcggggtatgaacctatgcagcatcgccggctgcacgcacgaagcagaagaagcgggcatgtgcaacatgcatttcacatcggcgctggttcacggagcgctgcactacactgcgggcggacgtccgtcgcactgctgagcgcaacaacaaagcaaaacaaccagtaacgctcaacggcttccacatgttcatgctctaattgcatgtacttgcagacacaatggccggtctgagccagctgccctcgcatggagcagctggctcagaccggccattattgttgctttgtactgtttgcactgtattgcgcctgcattgcgcaagctcgggcgcactcgggtgcactcgctgagtggcgtgaatcgcagattgctcaatagcaacgcaatccacgccactcagcagttgccatggttatgcgcggcgtttgcggatgacgagcaaggcaccagccgcagctgtcagcaccacaaccacgaccgcaatggcagccacggcaacacccgtattcgaaaggggcgcagcgccattagcagccggcttattcgtggcagtgttaccgggcttagcagtgttgccaggattgttggtatcgccgggcttctgctctccagggccgggagtgacctccgtggccgtgaccgtgacttcgaacgtcgcgttcacgccacgataagagacggtgatggtcttcgtgcctgcggtggcagaatcaaagccagtgaacttcaaatcaccatcagttggatcaatcagcttgcgcagcgtttcggtatcgccgactttgtaaatggcggataccttcacatcggcagcgttgaacttatcgcctacctgataggaatccttggtcacttccacagcaagctcggccaactgaggcagttcgccgaatgtcactgtgtaggtttccgccgtgccatcctcagcagttacagtcaccgtggccacgccgctgttctcggtcgaagcctgctccacctgcaccgtagccttcgcgtcagcagcagtcgcctccaccgtcgggtaagaagcagcgtctccggccagcgcaccggcatattcggtgatatccgcggagaatccgtcaaccgtcttgccatccacagtcagatcagcaagattggcgttactagacggctgcggctttggcgttgcttcaccttcggcgatgcgtacttcagcgatcttggcatagtcattgccatcggcgtaggtgaagttgaggcgaatgcccttggtggcgggcagagcgctcacatcggcttccgtcacggctccagcagcaccattcacagtgactgccggcagcgtggcatcagtccacgtggcgttgtcttcagctaggtacgatacagtgaagctcttcggagcggcctcgcccttggccttatccaccgcaacgctgagcttgcccagctgatatgccttatcgaaggtgtagctgagccacggcgaggtgtcgccggtgccccagttcgaccagttggtgctcagattgttgtcgcaagtcaggtcggccgtagaagcggaggcccagctgctggccggctcatacttcgaggctgcggcggacgagcagaacaaccgggcaaggttgctttccacagtcacggtgagcgtggcagttactgaagaatcagtgacaaggcgtaccgtcacggtttgctcgcccaatttggtggtgtcgaagccttccaacgtgtattcatctggctccagtacacgcgtcttgccattggtgagcgtagcggtaaccgtcacgtccttatgcgcgagcgtctgcctcttggcgatagtggcttcagggcccttggccgcgatggactccacagcagcagtctgcgaaccgaacgcagtgccgttgaaggccacggtgaatgcgccggcattgctgttcgacgtggcgaaagcaccggcatcgagcccggttacgtccgcaccggtcagcgttaccgtagcgacatcctgccattcatcgttcgcggaagcacgccagtagcctttcagagtatcggttgaggtgcgctccagcttgagctgcacttggtcgccgaagccggtaccaacatgcgatgtttccttatcgatgtagccatcggcattggaatcgtactgcatgtaaacgccgcttgggctggcaagtaacgtggcatatcccttgccgccgttagcgccagtaagaccgttacggaccaccagaccggcgcgcggatcgccattaccgcccaagtcgagcggcttgaccgtggttgccagcgtttcgttcacgtccagagcatcaggctggtacaccgcactgccctcgttgcgatccgtccagacgccacgattggcgttgtccgtaatcgtgaagtcataagcaccgccggacgcagaaacctggcacgcgctgccgcccttccaatgagcttccttccaacttccggaaatcgggttggagcaggaaacatcgatggttctacggaatgtacggcccggattgaagttactgctctcggcaagagtgcccgtaatggtgtaggttcccggcacattgaatgcgtaggtgctgccggcagccttggtcgacttgctgactgccgtaccaccttccacattccatgtcaccttggtagcaatggtatcgtcgccttccttgacgttgacggtgtccggcagagtaacggttccgcccgtgttcacggtcttcgggagatcatcgccggtttccacagtccagttgaccagcttgcccttggcgctaccatggttgccccaatagctcagatcccaaccgtcgggctcgccttcttgagcaggattatgcatttcgatggtgccgttctcaccgatggtcagcggcagccaaacataggtggaatcggctttaccggaatcccaacggtcaccaaggtagatgaagtgacctttctcctggtctactgcgagcacactagccgactgcgaaccgaatgtggtgccgcgggtatcgcccacagacaacagaccatccgcgccttccggcatgttgttgtaccacgtgttctcgttggcatcgtccttttccacgccacgggtccagcttcccagcatggagtcggcggtgtagtaggtctgcttgttcgggtcccagccggttgcaccagatgcgatgatgttgtaacgcccgtcatattggaatacggcaggagcttccagcgaaccattttgtttgacgatttggaaatcttcgccacgcaccggggcatccgtagtaccgtctgcaagaatgtatgggtactgcccgtcagcagagtactgcttttgtccctcggactggtccacattcgtggtcttgactacattggtgtaatcatcgttaagcttggcgatatacagcgtggcattggcttcggaagaatacagtacataggcactgtcgtccttcggatccacgaacacagtcatatcgcggctgtcaccgttctcaccccagctggggttacctgcggcttctttccaattgttctggttaggcaaacgataggcacccaccatagtgaacgggcccgccggattgtcggaaacagccacgcccgcaagtgcacgtgcatagttggaaccgcccggcgtggtgcttccatcggaatgccaccacagcacgtattgcttgttcttcttgttgtagatgatcttcggacgctcgaaaatgccctgtacggaatcaaccgcgccatcaccatcctgatcggggttggtgttgaggtacgggaagattgcgtcggccttggcagcgtccacactgccgtcggacttggtcaggttgtaggccttgtcgaagtaggcgtaatcggcattgctcttatccgtcaactgagatttgctggtcaccgcacgcagcgccacaccaagatcggtccagttgtatagatctgtcgacatataagcatgaacaccggggctgttgtcgtaaccgttagaacggtcttcgccataccagtagtaggcgtcgccaaccttgaccacttggccaccgtgcgcttggatgtgtgtgccgccattatcattggcgttcttggcataccaatatggctggaagtaatcgctagcgttcttgcccggatcggctgtgggctggaacttggtgtatgtcggcacttggccgatggtaggcaggtaatccacacctgccgcactggcacttgcagcggccagcccgcatgacaatagcgttgccgcggcggtaattgccgcgataagagcgcccttgcccttattgtttatcttcattgatttggttccttgattgatgataacggttttttgaacaaacagttatgtcgctatccgcgaagccagaaaaggttcgacaaatcaatataccgatactgaaaattcagtattcaacttgtcggaccaattatggtcaaagagcggaggaaccggccggcaatagtcaatattgccggcttgttccttcacccattactgcgcgagggtgctatgcacgcttgcgcagcatgaacagtgcacccgcggcagcggccagcagagcgacagcgccagcgatggcggcaacactggaaccggtgttggccaccgtgttcttgttgccgttgccggtggcaccgggcttgttggtgttgccgggcttctgttcttcagggccaggggcgactgcgttggccttgaccgtgacgttgaaggtcgcggtcacaccacggtaggagacggtaatcgccttcttgcctgcggtggtggagtcgaacgagccaatcgcaagctgcgggtcgtcaagagcgaccggcacttccttggtcttgtcgccactctggtagacggcagtcaccttcagaccggcggtatcgagcttgtcgccgatggcgtactcggtcttcgtgggtccgatcaccttgagcgaagccaaagtgaaggcgttgaaggtcaccgtgtaggtcttcgtctcagactcgtcggctgaggtcaccgtaatggcggccttgccgccaagcttgccgttctcaaccgcgtcgccagtcaccttgacggcggcggcattgtcggtggcgaaggcctgcagcaccgggtttgcctcggcgtcgaccggcagatcaaccgtgtagtcggtcttggacgggtcgaagccttcaacggtttcgccgtcaagacgcaggtcgcccagcgtggcatcggatgctggctgcggggtgagtaccgtgctgtcttgtgcgaacacctggatctcagccacgttgatgtacaccttggtgtcctgcaatgtgttagtcaggcggatggccttggcctttaccggggtgccgagcacgaagtcaacggtcggggtgtcggcggcggtgatgccgtcggagccagagccggcatcgccggcctgtatcttccagccatccttggtaccgactccatgccattcgccagcctcatcctggtattccagcgtctggctcttcggccaagacgcacgaccatcgtagtagaagaaggtcttcacttcggtgatggtctgagcttcgtcgaaggtgaacgtggcgaccgggtccaccgtcgaggctgtggaagcccaagtggaccaaccctttgacgtagtgtcaccatcgatggccttggaagcggaggcaccctcctggaagttcaccgagaagttcgtgccagaggccgcggcgatgttcttcgcagcaccctgaaccggcgtcacgaatgcctgaatttcggtggcgttcatgtagtcgttgttcacggtgttcacaatgcgcaccttcgtggcattcactgtgcccttatcggccttgaacgtcaccgtctggcctgcggcaggcttaacatcgctaccgaattgcatccacgtctcgccatcagtggtgtactcggccttggcggaagccggagccttgtcaccatacgtaatggtcactctgctaagctcacactcagagccgaagtcaatcgtggcggtcgggctggcggaatagtcaccagcagagttccacgtcacccaggcttcagctgacgtgtcaccatcggtgagcttcttccactgatcgcccttgctgtattccgtctgctggttggtcacggtcaggctggaagcagtgtcggccacattctcaggcgtggcggcggtgacatagatcgcgcctttcagcgcaatcgtggtcgcgtcgtccagctggtaagtaccggtcacggcaatgttgtcgccagccttggcatcggcgagcttggtatcaagcccatcgaagttccacgtaaccttagccgcatcgccctcgaatgcaggcgatgccttgacgtgcagatacaccggcgcagcctcaagcgcggccttcgcctcgctcgcactggtgccggccagcactgtagccgataccggatcggaaacggtgagcgcgccaacgtagaccgtagcggcgacattgaactcgttgccgtacacatcggtggcggtagcggtggcttcgtaggtgccttccttggccacatcgaccttggaagtatcccagttggcaaccgtggccttgccttcgccccaggtgtagtagagcgtgacttcggtcggcagcgcggccttctcgttaacggcggtctgcacgttcacggtcttctggctggtcggcgttacattgcgtagagtccatgtctggttggcggacggcgaagtgccgctcggtgactgccacaagccaaccttcgtgccgactgtggtaccagagttatccacatcgaggttcgtcttagtcgcggcattgagcagctggtaggtcgaaccatcggaagtgttgagaatccacttggcagccgggtcggacttagcggcctcaaccgtttcgttggaaagcgcgttcgtgccatccttggacaccagcaccttgccttcggcgttagtaatcacataagccttgagatcagggcgctcggagtcggcgggctgctcgatctgggtaaaggtccaagtctgcttcttggcgttctcggcatcggaagcgacgttggccagggacagcgcggaatcaccagaagtggtatcagccacggccttgccggactgcttaccaacgagctggtaagtgtcgccggtctcgacggcagcatccttagcgtagccggtcacgccagtgagctggatggaggcgatagaacgggcgggcacagtgaccgtagcggtcttggcagccttgtcaatcatcacagagccttcagcttgcttgacgttgctggtcttggcgaagacttccggagtggcggaatcgacacccgcgttcttgtcttcggcagaggtttcggtggtcaggtagagctcaccgtaagcgttgtcggcaatctcgccgtacttcgacaggtcgatgacgaaggtctggtcagaggtgccggagttgcggtggatgacggtctgcgtcttgccatcggcggaggtggcagtcatgttgttgtcttcatcgttgttggcgatgaccttgtcgcccgcgtggatgaagtgggtgatggccttgacgccgttgtacttggcgttggcaataaccgtgcacggttcaagtccatcggcggtaccgccgttgttgttcacgcgacgctcggagtagagcttgccgtccttaccggccacggtgcagtcgaagtcaatcagcacggtgccccagttggtgttttcaccggccgggttcacgttcgagcccatctgcatgttgtagaggtcctcgaccacctgccagaaggtgaagtccttggactgcaggcgggtgacgttggagctgatcttgctcatcatgcccagcgcgttgtcgaaaccgtacgggttgtaggagccggactgccaggagccgtccacctcgctcatcgacagcttcttgccgtctgcctgagcgatatcgcgcgattgcatctggctgccgtcggagtaggcgtgaacattgtactgatcgataaggtccttgatcgcctgcgggtactggttgtacgacttgacaaagtcagcggagtttgtagcatcagtggctgcgatgatggtgtcatcattgtccttgagcgcctcagcgagtgcggtaatcgtctgctgctgctgggcgttattgacatgcataccctcctgcggcttcttcagcgcgttggagtatggggtgacggacttatctttgtcggagtagtacttatcccagtagttgttaatgagcttggtgttgtcatcgctctcatcggtgtacttcgaagccatgtcgcccggagtgccccagtaactggtctcggactcgttgaacggctcgaccgtgtcaacgtttgcgccaaggctttcgaggtgctcgacgttcttggtcatgtactgagcgaatttctcagggtttgcaagattattgctaccagagttgtatccaccagtggcgtaaccgctgttggtcaggaaccacggagcggagttggcgaaggcctctacatcggtgatgtcggggttatcgccggtggcaccgcgctcaatccaccagtcttgggcggcggacttggagaagtcatactggttgtcgtcagtcgggtcgaatgccgcagccagcttgtctttgtcggcctgcttggtggttacgccattgccatacgtgccggagccggtggcgtcatctttccacgtgccaggcacggcagcgccttggcgcatgaatgggtagccgtaggcaacatcggaggcattgccgccgcccacgttgtagcgggccatgttcaggtccagtccttcatcaccgaagatggactggtagaactgttcgcgcagctgcttgccgtattccacagccttagccttggaagcgtcatcgccgagattggtggtgatggccgattcctcgccgaggctgccggtggcgttggcgaaccaagccagtgaggtgccccagccatcgaaactgttggcataccacgggttcggggtcacggtaatggcatcgttatcagccgcatacgcagtgccggcaaccgcaaacgcccctcctcccactagtgttgccgccgcaaccattgcagcaagcgatttgctcagtaccttcattggtctccttagtgttcctgctgtccgccttataccggaaaaatcggcctttgcttcactgagccggcctctttgcctgatacatgacctacgtcgactccttctttcggcgcagccaaaatgtttacgcaaacattttgatatgagcgattttatcacaaaaccgtcacccagcaaacaacttcagagaccacaaacgacgcacaaagtcatgagccattcgaattgcgctggcccaatcgctacgaatcatatttgccgtagcccttaagtgaatcccactgcatcgagatatcgcgcccgctatcccttccgataacgccgaccacgcgtgttgccttcagcaatcagctttccttgcgcaactaaaccgtttaggaatttgcggactgttctgttatcgagctctgttatcttggcgagttcaggtacagtcacatagtcaacctctgtcaagcgtcgattcatcgccgacagcatcgctgcccgcgaatcaatttcacccgatgcggttgcatctgctttcttaccatccacacgttccccgccaatgagcctcgcaccctcttcggcatctttctcaactacagatctcacgctagcaaaaccagaaccatccacggtcttcagcgcaggaacaataggaatcgtcgcctcgaatatgtcaccatcgcggaactcaggctctcgctcagtatattgccgggacgctcttatcagattccgcagtccgctacccagctgctcggctatgccggtctgcacaaacacattagcgataatcggattctttggcattggcgtgaactcgcccagcttcattcgaccttcaaagaatgagcgcgaagcattaaccgtccggatggattcattatcaatggtgacacgcgccaccaccggactggaatactcccgatgcatgaggctgtttgccaccaattcacgggcgatcatcgtacgcgggctcactcgcttatcgccctttaacacaaagcggtcaggcagattccgctcagtaaattcacggagttgctcgtacgaatcgaacaagttggtccgcaccataagtcggtcatcgtatcggtcaatattgtctcgccgaaccacggcatcagtaatatacgctgggcaaaccgaggaaatgacttcatccttgcccaagagcagcactgcagcaagattaaagccctcttcgccggtcgtgtaatcacgatcgtatagcttggcgctgcggaacagttcttcgtcagacatagttccccaagggtgcccagctcgctgagcgaccgccagctgccgcattcgcgcaatcagctcaggacgcaaatcaaacggagtcacgtaacggaaaattcgccgttcggaatagtagttctgcttgcgaatatacatttgactaatctggatatcgctttcgatgtgtgtatccacatcagcaatgcgatcaaacactgcgcccttgaaccgcacaaccgaagaactcggagctacccaaatacgaacaataatccgttcgtcgtactcgatatgttccgtttccaccattggagccggttcgaacatcttacgattagacactacgttgacaacgttgcgctctatctcactaacgcgcttagaatcgacgccgagcacttgaccgtcatcgtcaacgccaagataaatgctgccaccagaacgattggcgaatgagcatacagtctcaaaagtatccgtatgaggcaattcgctgcagcgcttgaactcgaccatagatgattcaccggcctgcagcacttgcataagttcatcctgcgtcatcgcattccgcccttcatagcgataattcatacattaggacatggcacttatcgtattttagcatctaattagtacattaggacattgttttatgtcctaatgtactaattaggcggctaattgtactaataattgcacactgatgtactaatccgatgatcgaatgcactaattgtccgcacaaatgcactaatcggatgaccgaatgtatcaatgagacctataggcagccgattggctgacgatcagcccagtcattggctatcggccgctagccagtcagccgccaacagccaacagccacccaaccaatagccgccagccaatcagcccgtccaatcactccttgtgttccagtgcggccttcaaatcgcggctacggtagcgttcgcgcagcatagagaatccaccgaagcccacaagccacaccaggccggcaatcgcggaattgcgcgtatcgtccgcaaggaacaacgtcaggtagatgaacacgaagaacacgattgccaccgtattgagcaccttccacgcgggcatgacgaacccgtccggaatgaaatcagcggaacggcggtacctgcgatgcgccagcagcgtcaggatgtagatgaacaggaacaccgcggagctggcggacgagaacagcacgaacgctccggacacaccggggatggcgttgacgatcggcgacagcagtatcagcgccgcggacaccaggatggcgcgggccggcaccttgcgatcggacaccttgccgagcttgttcagcatcgggttcggcgacacctcggacagctggtacaggtggcggccagccgagtacagcagcgagttcagcgcggaagatgcggcggtgatcaccacgaagaacaccagcgcggacgcccaattcagcccggcgtactggaacaccataatgaacggggaggcaaaggagccgtcctcgttcggcttgaacgaggtccacggcacgatgcacatgatggccaccagtgcgcccacatagaagatgagcacgcgcacgataatctcgttgatggccttgggcagcaccttgcgcggattcttggtctcggagacggtgacgcccacgaattcaatcatctcgtaggcgaagaacaccatctggaagctcatgaggaaggccatccaaccgttcggcgcgaacgagaagttggcgaacaggttgtcgaatccggcgtggccggccgggctcacgtggtccacgccgtgaatctgcacggctgggtaatggtagccgatcacgatcatgaccacggcggtggcgatcatcgcgcaaatcagcgtgatcttgatcatcgagaaccagaattccacctcgccgaacaccttgacggcaatcaggttgatggagaccagcgacaccaggaaacacagctcgatcagccatttccaatgggtcaggtcgatgccgaacgtgtcgaagaaggtgatgaagtacgtggagacggccgtgatctcggtcatgcccagcagcacgagcgcggcccaatacgtccagccggcgaaatgcccccacccgttgccaaggtaacgggtgatgaaattgatgaaggtgtgctggctggggtcacggtacatcatttcgccgatggcgcgcatcaggaagaacatgatgacaccgaccagaatgtacacgaagatgatcgaggggccggttagcgagattgacttgcccgagcccaggaacaggccggtgccgatggtgccgccaatggcgatgaactgtacgtggcgattgctcaggccacgctccatctcgttggtctggtccaggctttcgacagacttgagtttgcccgtagcctgctgtgtaccaccattcacattcgtatcggccatactgatttcatttctcttctctgccgcccgattgttacgcaccagacgcgatactcgttcaaaacaagttcaaactgtatcaccgaaatatgtcacgaaaaccgctcagctcaagaatacatgcgatgatactgtaaatattccgccaaaaagttcaattcatcaacaccaaattgaacttctacctctattccacggacttgagcgagctgaccgggtctacgcgatcgagcactgggttggtgaacagctgcaccagcagcgcgaacgccagcgtcgccaccacggcaatcgcatagctgtaccagtgcacttccacttcgaaatacagcgacggcatattcaacgcagcggtcagtaatccgcctatccacctgccaagcggcagaccaaccaccacacccatgccggtcaatatcatcatctcgcggttcacgtagttgtgcacctcgcggtcatagaagcccagcacctttagcgtagccatctcgcggatgcgttcggacacgttcgtattggccagcgtaaacagcacaaccagcgccaggccgccggcgagtcccacaatcagcgccaccacggcacccatcaaatcaaacttaaacgtggcggccagatgcgcacagctcacggccttgagcaccgacgattccttgcccaaccgatccgtgtattcggcctgttcggtctcggaacctttcagcttggcaagcatcgcgttccacgtcagggtcgaggcagtgccatctcccggagccgaagacgtcacaccgtcggccgcaaacttctggtcgtacagccgctcgctgatgtacacatcagagccaacaagattgcgcgtcacggccgcgacctgcaccttagcccggctgctaccgccattgcccagcgtgatggtgtctccggcatgaatattcagcgagttggcggcggattgcgacacaatcacgccactatcgtccagctctacagtgccgccgcccgccttgccaaagatattgggaagcccgaaccatccatcatcgccggcttgttccagcgtgaccatatcgttcaagatattcagcgaatcgttgggcacggtcatcagctgcacggtttcgctttcctgggccgcattgctcatctcgccactatccacgcgcagattcagcgtttcggtggtctgcccatcttgtgccacctgcttgcgcattgcggcagcatcatcgtcattggccacgaccatcaggtcgtactggtagatctgctcgtattgtttgacgccaatcgtgtcgacggtgtcattaatcgcaaatccgcagataatcaacgctgtgcaaccggccacgccgcccacggtcataatcaagcgcgacttgaatcggaagatattgcgcgcggtgactttgccgaggaagttcagccggctccataccgggcgaatccgctccagcaatatgcgagcgcccgctttcggtgccttcggccgcatcagcgcggcgggcgtgtgccgtatctcctcgcgacaggcgagcgcggtggccacgcccacgccgaccacgaacagcacgatgccggccgaaccgtacagccagtcgtattcgagtcgcacaccgggcaatatatacagtccctcaatcaccaccagcaggaatgccgggatgccaaggaatccgaccagcagaccgatgccgccgccgaccaagcaggcgagcaacgcgaacagcagataccggctggacacggcgagtccgccatagccgagtccaaggtaggtgccgataagtccgcgatcttcctcgaccatgcgggtcatggtggtcaggctcatgagcacggcgaccagcaggaacacaatcgggaatgcgcggccgatggattcgatggaactgacatctgatttgagcgagctgaatccgtcgatcgaagcgcgcgtctgcacataccaacgtgcgttggccacatcgtcgatgcgccgttgctgcttggcgaattcgctttccgcttcgcttcgcttcgcatcgagttcagactgcgcatcatccagtttcgccttgccgtccgcgagctgttgttcgccttctttcagctgccgctcgccttcttcaagctgctgcttgccgctggccagttgggcggcctgcgcttcaagttgcgccgactgggtttcgagggttgcggcattcgcttcgagttccgcggatttggtattgagctgtgcctctcctgcagccgcttcctgttccttggcggtcagttgcgcgttctgctggtccaaggtggattgtgcgggggcaatggtttcgtttaatgtgcgctgcaaatcggctttctgctgggtcagactgtctcgctgcgtttgcagttccgtttgcttggcggccagctgttgccgcagctcactgattgacggcacttcaggcacggtaatgccaaggcgcgcgagcagttgcttgatggcctgccatgtgggtgagttgaagtcgatattcgggtcaagttgcgccagtagattgttggcctgttgaatcatgggcagcatctgatcaatttgcgccatgccttggtcgatttgggtaatgccctgttcgattttcgtgcgattggcagtcagttccgtttgcgccgcatcgagctgtttgcgagccgaggtgagctgcgttttgcctgattcgagctgggtgcgcgcttcggctatctgctggcgaccttgcgcgatctgttgacgggccgttgcaatctgcgcacgtccatcggcgagctgccgttcgccatcggtaatggttgtcctgttgttctccaattcggtacggctatcttgcaatgtcgtttcgttggcttccagctcggcccagttgtcgtcgatctgcttctgggcttcgtccagctgctcgttggcctcgtcttgggcatcgtccagtttgcgctgcgcgctggagacgatctgttgacgacgggctttctggcgtgtggtctgtatctgatgttcgatacggtcggccacggttttgacggcttcatcgtaggcatcggaaaacgtgtcaaaatcggacgcaccagtgacggcaaccgatatcgcagtgtatatattgccggtcacgccgtcgctgggtgcaaagaacgtatagtcctcggatgaggtggaccggaaggaggtcatgcccgaatagccgtctggattgttgaggtcgcgcgggtcgagtacgacgccggtgatggtgagtttcgtggggaactgcggggattgttctgcgtcggcgtccgtattggcgtcggacttcgcatcggatgccgaggcattggcggcggcacctactgtgtcggcatcatcggaatcggcattggaatcgtcatttttggaatcgtcagtctccgtggcagctaccgatatgacggatgaagaggtgtcttgtggcgttacagtaatggtgccgccaatcttgagtccgctatcgttcaggaactgctgagtcaccgccacttcgccggccttgttcggcagtttgccttgttgcaggtacggctgatcaagcccttcggtaccgatttcctgcatggtcacggttttcttggtgccgtccaccaacgtggtcaccgtctgagaacgttcgggctgcacggtttgcacaccgtcgattcggcgcagtgccgccgcatcatcatcggtcaggccgtatgtggatagcacctgcaggtcatgcagtccctgctgatcgtaaaaacgaccagccgccagaaaagcatcgcggcatccggcgtagataccggtcagcacagccacgccaagcagcgtaatgacggcgatcgagacgaaccgcttccagctgcgcagccagcaccgcaacgtgtctttggcaaataccgcagaaacgcccgctcctcgaccgccgttatcgtcgaggttcggccgtttcacagactgtttcacggatcgcctcgcttgtttcacgggacgtttcacagagtgtcttgcagcgagcatcgccaatcacctaccattcgatatcggcgatgggctgcggcgttgcgttgacctcctcgctggtcaccttgccggagcggaagcgaatcactttatgagccatcggcgcaagcgcggaattatgcgtgatgatcattacggtcatgccttgtgtttggcaaatatcctgcagcaactgcagcacttccttgccggtctcgtaatcgagcgcaccggtcggttcgtcacacaacagcagcttcggctttttggcaatcgcgcgggcgatggatacacgctgttgttcgccgccggacagttgtgccgggaaattccccatgcgctcccccagtccgaccttgtacagggtttccgccgggtcgaaatgatcggggcaaatctgtgaggcaagttccacgttctccagcgcggtcaggttcggcacaagattgtagaactggaagacaaagccgatgtcgttgcgccggtaggtcaccaaatcgcgcttacgcaatccggtgatgtcgcgatcgcccacaatgacgcggcctgaagtcgcggtatccatgccgcccagaatgttcaacgccgtggtcttgcctgcgcctgactggccgaggatgacgcttaactcgccttgatcggcggtaaagctcgcctcatcgagcgcccgaatcacgctgctgccggaggggtattccttgaccacatgatcgaattcgatatatgccatcacgcacctccaacagttcccaccacggcccgctccattcgcaatgccacctgcgttcccttgctatactcaagtaaaacaacactgtgtcggttctgcaaccaacagttggattgtgagttgtcggaacttggggagaatgccatggccaaggatttgacggaaagccgccgcacccgatacacacggctcgccatgcaagacgcgctcgtcgagctgctgcaggaccagccgcttgggtccatcaccgtcaaggcattgtgcgagcgggcggacgtgaaccgttccacgttctatgcgcattacacaagcattgaagatctactgcacgatatcgaagacgagaccatggcctgggttactgccgcgctcgaccagttgctcgcgcagcctgattcagccggcatcgagcacgtcatcgaacgtatctgccaatacatcgccgacaatcgcaagcatctgcaggtattgatgagcccgaaagcagatatcggcttccaacagcagctactgggacttatttacagccggcagacagtcgccgagcagctgcagcccgccgccaacgacccggtcgaggcccaaatgcgcatgcgcttcgccgtatccggcagcatcggcctactgcaatactggctcgccaccgacctcgcagcatctccggaatcagtggcccacaccattttcaccatgggcatgcccgtctcgcagtgaattggtggggatggtttgataggccactgccgactttagctgtttcgatcaaacgcgaataccggtatgggctggcatcggcattctttggcattacggcatgccgcgccttacaatgacgagcgttgcgcatggcgacctcccgccggtcatgctaaaaatcaaagagactcgagagaagagcacaatgagtactactgacgcacctaagaagtcgcgcgaaaccgacgatgtgccggtgccggccacgctgcgcaagtcactgaagaaccgtcacatccagctgattgcactgggcggcgctatcggaaccggcctgttctatggttccagcgaatccatcgcgctggccggcccctcgattctgctggcctacctgatcggcggcctcgcgatcttcatgatcgtgcgcgcgctgagcgagatgtccgtcgaggatccgaaggcgggcgcgttcagctactatgccactcgctactggtccaagcgcgccggcttcatctccggctggaactactggttcaactacatcctcgtctcgatggtggagctgtccgtggtgggcaaattcgtaaactactggttcccggcgattccgacctgggtgtcggcagccgtattcctagtggtcatctgcgccgccaatctgctgggcgtctccaagttcggagagttcgagttctggttcgccatcatcaagattgtggccgtgattgccatgatcgtcggcggcctggccgtcatcatcttcgctctgcccaccgcatccggcgtgcgcgcaagcttcgcgaactggttcaccgtgggtaacggcttcttcccgaacggcctgatggggcagaattccgacggttcctggaccggcctgctgatggcactggttgtggtgatgttcagcttcggcggcaccgagctcatcggcatcaccgccggcgaaaccgaggatccgaagaccacgattccgcgcgccaccaatgatattatttggcgaatcctcgtgttctacatcggcgcgctcggcgtaatcatggccgtaataccgtggaacaccatcggcggagacgatgttcccagcccgttcgtgcaaatcttcgattccgtgggcatccacgcggccgccggcatcctcaacttcgtgtgcctgaccgctgtgatgagcgtctacaactccggcctgtacgccaactcccgcatgctgtattcgctggccaaacaaggcaatgcacccgcgtatctgggcaagctcaacgctaagggcgtgccggtggccggcgtgctgacgtccgccgtgatcaccgccatcgccgtggtcgtggtgttcgtgtggcctgagttcgcgttcaactatctgatgtcgattgccaccatcgccggcatcatcaactggacgatgatcatgttcaccgaaatgaagttccgtaaggtggtcgccgcgggcggcgctcccgaggattccgaactggccggcaagtccggcaaggaagcgctcgacgcgattcacttcaagctgccgttcgccaaagtaaccccgtgggtggtattggcgttcctggcactggtcgtggtgctgatgtgcttctccgccagctaccgcgtcgccgtcatcgccggcgtgatttggctcgccatcctcttcgccgcctaccagctcactcaggcgaagaagtaaggctccatttgcgaatagctctcactgatgagcactcagtgagagctattcgcaaatgggatttattcatgaaacagctcatcgatgccgacgagctgaacgtcggattgagacgccgcagcatcgtcgaccagtgattgatcgaaaccgccgagcgaaaacagcaggtatgttcgctggccgataccggttcgcgcagcacggtctcgcagtagattcagcacggaacggtccaccggcgcattgcggaatttgcactcgcccacaatggcagcatcagacgcattgtcaacggccatcacgtctatctcatcctgacgatcccaccaacggccaaccgcacgcgcacggaagggcaaccgtccagcagcactctcacgccacatccattcacggcacagaccctcgaacggtttgccggcaaaatcatgtaataccggcttgatatgacgctcgtatacgccttccacatcgccccgctccaattccgaacgatacggaaagacaaacgaataccagaatcggaagaaattgtcgctcagctgatacagcccacgcgaacctttcgcccgctccttaggcttcgccgtgactgggaactcacgttccacaatccccagttccataagattggcgagatacgacgatactgttgcgtttgccatcatcgtgtgtgtcgcgatctcattcagcgaagttgcgccgagcgcgatcgcccgtatcacgctgttatatttcgcagtttcccgcagttcttcgtgcaacaaaaattcaacctcgctgtatagcggagcaatgcgtctcagaatatgccgcttgacatttgcgtctatggtctcatctgggtcaaattcctctaggtaacgcgggataccgcccagtattgcgtaggccagcgccttatcctcgccactatagttggggaagaattgcgctgcatcccaatatggcatcggcagcatcttcaggatgccggtcgcacgaccatatagcggcgatttttctcccaacagctccttttcgatgaagctcatggcactgccgcaaatcacaatcatcagatttgcatgacgcaacgtgtggtcccaaagattctgtagcactgacggcaatgacggatcagatttgaccagataaggaaactcatcgaatatcacaagcctgcggccgccatcgctcggctctggcagccgggttaactcggttaacgccctttcccaagaaggatattgactcagataatccttgcccggggcacccgcctcgaacatgagacgggagaacgatgccagctgttcatctttagtggcattctgcgccgcgaagaataaggtttccttgtcttttgcgagttgaataagcgtctctgtttttcccacgcgcctgcggccgtagacgaacacaagctgtgccctacgctcagtgaaacattcctgcagttgcttgaggtcatcgtctcgtccgatgaatgccatgctgcccgcctcctttatgccatacgccggcgtatttctatcgcatcacgatttattgtatcacgattagtataatcgtgattatacaagctgtgacgaggtgcgggtacgggccaatttgcaaaaaactctcactgagggggaggtggtgacggctttgaggtcgagcttgccgcaggtcaggtagaccatggtggcgaagtagtccatgtcacggaagccgcaggcccgtctcttcacgttccggacgacgctgtcggcgccctcgaggacggcgttggcgtacgggtgctcgaagtacgcgacgacctcggcgaagcggcggcggaccagacgggcgggttccttcacgggttcgagcctcgagtgtatcatccacgagcacaggcggtatagcctgacccatgccccggcgggcggtgtttttagtcaagtcggtgtttcgtgttgggggcggtgacgttttgttggacttcgttgtctgtatggtcgttggtcagtgtaccggatggtttcaggcgacgagcccgagctggatgcgtttgtccatgatgctcatgccgtattcggtcttgatgcgcttgtcgcggtaccagaccatgtactcgtcgagcatcgcggtgaactcgtcgatcgtcacgccccggaagctcctcttgtggaagaactcctgcttgagacggccgaagaacccctccgcggccgcattgtccggcgaacagcccttcgcgctcatcgaccgggtcagcccgtgctcggtgcagatgcggatccattccggccaccggtaatggcaacccctgtcggaattaaaccgacatcggtttaattccgattaagccgggtttgttgttaagccggggaacggttcggggtcttggtggctggccgtgtcccatgtggtttcccggcttaacgttccgggttatgttcgtcttgtcccatttgattcgaacgaaggagtttgccatgggtgagacgacggttggccatgtcgcgggcgaggtggtccgcgcgctttacggggccggttatatggaatccaccataggccagtaccgcaagtccatcagggcgttggaacggtacgccggaggcccggatgcggtgtacacgcgtgggttgggcgcggggttcgccgcgtcgaccttcagtgagcggacgggcggtttcagcaggcagcggtggttcgattacggcaggctggcgcgtttgtgcgactcgtatctgcggtccggttcggtggacctgggcaagtggcgcaggagcaggcttgcggagccggtggttccgggtttggccgtggtcatggaacgttgggaggcgtatctcgccggttcgggactggcttcggcgacggtggggcattaccgtcggatggcgggcttgttcctcacgtggctggaatctcatggggtcgtgtcgttggatggttcggatggctcgcatgtgctggggttcctggccgggctgcgttcacgctggtcggagtcgtcgatgcggcacgccgcgtcggacctgcgcccgttgttcagatggctcgggcgggatgacctggcggacgcgatcggcctggccggcatacgcaggacccacgcgatcgcgggaacgttgcccgacgacgagcaccgccgcttgctggaggcgtgcgcctcgcggtcggtgccgtcgagggacgcggcgatcaccctgctgtcgctgacgtgcgggctgagggcatgcgatgtgatcggtctgaggatcgccgacgtggattgggattccatgagcataggtctggtgcagcgaaagacgggcaatccgttgaccgtgccgatgacgggaccgctggccgcgaggctggcgtcctggctgttggacgaaaggcccgccaccgacgacgaccgtgtgttcgtgcggtacaaggcgccccatgtcgcgcttcggggtcattcatcggtgtacgaggcgatcagccgtgtcatgcggcacgccgggctcggacgccggggcggttccaggctgttgcggcgcaacgcggcgacgaggatgctggaggcggccacgccgttgccgacgatcagcgcggtgcttggccacgccgaccccgattccacacgcgtctacatggccacgcaccgcgggggaatgctcgcgtgcgtgctgcccgtgccggaaggcggatcgtcatgagacccacggaacacggattcgtcggcccgctcgccggcgaattggaggagtacatccgcttcaaggcgtccatgggcaggcatggcgccacccgcgtccgggtcctgcgctcgttcgaccggcattgcctcgaacacggggccgtgcgtctggagcggggcgtcgtggagcgatggatcgcccataggatcgacgcgaatcccgggggttgccgctcgtggttctcgtacatcagggacttcggcaggtggatgcgactggcccacgatcccgacgcgtacgtgctctccgaccagtggaaggccggatccccgcgtccgacgccgtacctgctgacggaccgcgaggccgccctgttcctgcgggccgcgggaacgttggagtctccgtcgccgtgggcgtggcagtctcgcgcgttcttcatgctcatggcctgctgcgggctgcgcacccgagaggtcaggagactcgccgtcgggcacgtcgaccacaaggcccgttccatcgacgtggtcgattccaaggccggtcgcagccgcaggctgcccgtgggcgacgaggtcgccgccgaactgctggaatgcgaccaacggtcccgcgaacgcttcggagacgaccgtcccgcgttcttcgtcacctccaccggcaatccggtctccccgggcatgcccggcgtggtgttccgccgcgtctggacgcgggccgggctcgagtggccacaagccggcaaacggcccaggccctatgatttccggcaccggttcgcgttcgcgaacatcgagcggtggactcgcgacggcgtggacgtgatggcgatgctgccctatctggcggcctacatgggacacgccggcatcgacagcaccctctactacgtgcacgccagccccgatttcatggacggatacgcggacctcgtcgccgacgccgaacgcgtggtcccggaaacggaggaaccatgagcaaggcaaggaaaacggccgccagctccggtgaaccggacttctggcgagtcgcgcgcgactggctgcaccactggctgcccaaggtgcggggcagctcgccgaagaccgtcgaggcgtaccgcatcggcctggaatcctacgtccgatggctcgaaaccacggaaggcacgcagcgcagccacatcggtttcgggcatttcgaccgggcgcgcctgggccggtgggtcgaatggatgcggaccgagcgcgggtactcggaccgcaccatcatgctgaggatgacgacgatgcgcgtgttcctcgaccacgcgggcctcgaacacccggcattgaccgcgctgggcaacgacgcggccggcatacgtgtcaaaccacccgcgcgcaaacccgtcgaccacctcggggaggagcacgccaaagcgttgctgaccgcatggggcaccggcgacgccaaatcgcgcaggaaccgcatgctcctgatcctcatgtacgacaccgccgccaggatcggcgaactcgccgcactgaccatcgcggacgtgggtatggataagccggccagggtcacgctcaccggcaaacgcggcaagagccgggtcgtgcccctgggagaaaggacacgaacccacctggccgcctacctcgaggaattccatcccggaccgtccatgcgcgacggcgacaggccgttgttccactcgacgaggaacggcgccatccagccgctctccgtggaccggatcgacgagatcctcaaaaccgcggcggccagagcacgccgcgggacgtgcccgtccatgcccgaacgcgtccactgccacctgatccgccggacccgcgccatggacctctaccaacagggcgtgccgctaccgctcatcatgcaactgctcggccacgaaagcatgagcacaaccagcgcgttctacgcgttcgcgaccctcgacatgatgcgcaaagccgtcgatgcggccaaccccggccccgacccctccaaggagacatggctcagcgagcaacgactccgacaactacacaccctcaaataacccggaacgttaagccgggaaaccacatgggacatggccagccaccaagaccccgaaccgttccccggcttaacaacaaacccggcttaatccgagtggatgatcggcgtctcgccgggcttgagcgtggcgcacgcgtcgcgaagcatgccgttggccagggcggcgttggggctcgtgccgatcgtccaggcgacgggcatgccgtcgtggcagtcgatgaccggcgacaggtacaccttgcccgccgggatcgagaactcggtgatgtccgtgacccacagccggttcggcgcggtggcgtggaagtcgcggttcacgagattcgcgggtgcgccgccgatctcgcccttgtacgaactgtagcgcttcgcgctcttgagcacggggaccatgccgtggctggtcatcaggcgcatgatgcgcttggccgacacgatgatgcccgcgcttttgagctcgaggtggatgcgcttgtacccgtaacgcctcctgctgctcccgaacgcctcgcgcaccagggacaggaggttcgcgttcttgtccggccggcgcatggccttcaactggtagtagtacgtgctgcgcgcgatgccgacctccttcagcaggctctccgcgttcacgcccaacgtctcactgatgtccttgatcagggtcgtcttctctcggcttgtcaggttgtccgggtctgcgcccggctcttttcccaccagttccgccgcacccttcatgatcgccaaccggatctccatggcccgctgttcggcgcgcagacgctcgaggtcggcgcgcaacgcggcgatctcgccgcgcagcgcgtccggatcgtcctgctgcgaggaatccccgcgttccggttccctcttcgccaccatgagtcctttcgcgtctccgagcagttgacgcttccagtttcgcgcgaccgacgaatccacacccaccgcctccgcggcctcgcgcgaactcaattcgccggacgcgaccttcaggaccgcatcccgtttcaattccccgggaaccgggccacggcgaatccggcgttcgcccggcgcgagctcgtcgatccacgaggcaagcgcctctttgctcggataccccatctgacgcatcgtgcggctcgcacgccgcccatgcgtcagataatggtccacggccgcacgcttctgctcctccgtgtagcgcgcataccgttcaccacgctgcgaggacacgcccgtcccctgttcgtcgagccagtcccggtgccacatgcgcaacgcctcccggctgggataccccagctcgcggatcacatccgccgcgcagcactcgtatttcacatacaactcgaccgcgcgttgccgctgttccctcgtgtacttcgccatggccgtctcctcctcggatcacagtccaagaaaacggcaccacccccgtttcgtcactaatttttggcctttcgctgtttgtggtgggtggtttgggtgcggggggaggacggtgcccgccccgtgggccaggcccggcagcgggttcacgctcctgttcgaggcgtgggccgtggagatggcccgccacctgcccgccggcacgctcgccgagcaattggacgagaccgacacccgtttgtggcggttcatcgcccattacgtcgacgaggcgaggaggctggaggactacatgggtgtggaggccatcggcatcgacgagaccagccgcaggggccgcaattacatcaccgtggtcgccgatctcgtggagcacgatgtcatcaacgtgacgccgggcaaggacccggccacggtcgaacggttctcgcgtgatttcatggaccacaacggggtcccggaatatgtgcgtctggtcgcctgcgacatgagcctgggcttccggaagggcatccgtgagcatctgccccatgcgcggcggatcgtcgacaagttccacgtggccaggcacgccaacgaggccgtcgacaaggccgggaagacggaaggccgctccaacccgctgctcaaacggaccaagtacctgtggctgcgcaacgaggaaagcctgaccgaactgcaggtggagaccaagcgcaacctgacgaggcaacggttgaagaccggccgcgcctgccggatgcgcgaggtcctgcaggacatctacacggacagccgcaccccgtccgaggcatgggtgcgcctgcatcgcctgtgctcgtggatgatgcactcgaggctcgagcccatgaaggacttcgcccgcatgatccgacgccacttcgccgagatcgtcgcctacttcgagcacccgtacaccaacgccgtgctcaagggcgccgacagcgtcatccagaacgtcaaacgacgggcgagaggcttccgcaacatggactacttcgccaccatgatctacctgacctgcggcagactcgacctcaaagccgtcaccaccacttgaccattacccaccacaaacagcgaatagccaaaaaaaaatgacgcatgtgctgttatacattaaaacgcacagaaaatcacatatatactgtgcgattttctgtgcgttgcagtgagcagctactcagttatgcgcggcgcttgcgccagatggacaacgcaatgccggcagcggcgagcagcaccatggcaccgctcacgccatatacggcggcaccggtggccggcaacttgccgtcagacttggtgtcatcggtcttgtcgcctgcgttatcgcccttgttgccaccatcgccggtatccggcttggtgggcgtttccgccttctgcaatgctgcgatggcggcgctcagatcagcggcggccttgtcaaccacagcctggtcggaggaagcgagcgcagccttggcggcctgcagtgccttggcgagcgcagcccaggaatcagccgtgtaatcggattccttgagcgcttcggcagcggcgatctgcttgttgagctcaaccaaatcgaccttgccctgttcaatgccgtcaaccgtagtatcggatggattgaccaaaccatcggtgtagccgtcgtaagcaaccgcaacagtgccagagacgctggccgggagggtcacagtggccttgccttcggcgtcgagcttcacggtcttggaccagtcgccagcagagaacttcactgaaccggcgagcgtgcccttatcggcggcggtcaccgtggcggtgagctcgcgggtgccggcgttgtactcggccttggtggtggagtcaacagcctcgatgtgcgtcgggttggcagcggtccaggacttcgtcaccttgagcacagactcaggcacgttcacgaacgcaccgtgacgcaccttgtccggcagaccgccgttagcaccctgagtgatgtagccctgagcgcccggctcggctttgaccggcttcttttcgttgttgaagtccgggtaacgcttggtcatcgggttgtcccacgtggtcttggaaagctcggcacccgtggtcataaatgcacggtaggcgaagttgtcggacagcagaatgtagccgtcgtcgtccttcgtgttgagttcgtcatccttgttgagcttgatggtctctggtccttcgaacggcagcaacgcctgctcgagcagctgccaaccggtgttcgggtcctgatccggagatgcctcggtggtcggtgcagtcagcaccttggaacgctcaaggaagatgctcttaccagtggtgatgtaaccgccagcggcaccgccctgctcattcttggtgagtcggtagtagtaaccaccgatcttacgcacggtggaatcaatgcgcgcgtaaccggtatcctgccacatctgcggttcagtgaagttcacgaagtcgcgggtgatggcgtaacgcacctgagcataggagctattgccggttttgtcgttcttgaccggagtagtacgggtgtcatcagtgaacatgcgggaagagaagaacaccacgtaagcgttcaggtcatcatcccagtaagcttccggtgcccaggtcataccggcgttcggcgtgttgatggtgatgccgccgttgccgtcgccgttggtacgggtccagttcatcatatcggtggactcgtagacctcaactttccgagagccgttaacctggttttgactccagcccattgacgagaccttgagatcagtggcaatcaggtagtacttgtcgccttcgtgggaacgcagcacgaacatgtcacgcaagccacccgtgtcggcatcattggtaagtaccgcctggccattgttgcgagtcttaaacgtgaagaaatcgttcttctcagtggaagccacccaggccttttctccaccgttgctgtcgctctcaaaagtgacggccgcatagccggtgtcaggcgcgatgcgggtcttctccttgacagtgacctcgatggtcttggtgaccttctcaccgccgttgtaggaagcggtggcggtcagcgtaaccggcttggaatcaccgtcgccgtaggccggacgattgatgatgccagcaccacgatacgggtcatcggcaccagtggtcttgttttcgtacttctcgttagtggacgtaatgagcttctcgtccgaggacttccacgtaatcgccgagccgttcttggtgcccttggcgactagcggcagattctcggccgccgggactttcagcgcagcaatcgcggcatcgaggtcggctgcggcggcgttcttggcgttcatcggctcaacggtgacgggcagttcggccttgacgccacccagctcagtggtggcggtgatggtggcagtaccagccttgacgccagttacggtaccgtctgcggcgaccttggccacggactcatcggaggagaaccaggtgacgttcttgctcacggcgtcgtccggagtgacggtggcggtgagcttggtggagtccttctcaatcagggtgagcttgttgttcaccacaccggtgccggaaatcgcaacggcggtcggcatggtcaggtcagcgcccctgtagaccttgatgtcatccattgcaccattccagtactcatcgacggagtagaacgacttgccgatgtaggtggtggtcgcgccgagatcgctcatcttgatgccggtgttggccttgaaaatgatcagggcattgttgcggaacacggcaaggttggtgccgtccacgacaatcttgtaatcggcccagctgttgtcgttgccggaaacggtgaccttggatccctgttcgttaccccagttgttgttggagataacgcccttgatggcggtcttgctgttgtagaacatcaggtacttgttggcgttggcctgatcggtggtgttggcgtcgttcgagccgtccttgccgacgatgaacgagaagaacttgccgctgttgtcgtgacgagtcttggacgcgaactccagagtgaaggagtcgcccgcatccttgaacagctggtcatcgatctgggcgtactggccatcgccgcgcagtgagagcgcctcgttgttgctgcggtcaccgtactgttcgatcttggcgccgtccttcagcgtcaggttgtacttgccggtcgaatcggcaatcgcgctgttcgtggtgccgtttttgcccgtgaagtcccagctggcgagcagcgtcggttcagcagccttagtagtctgcactgtcgcggtatcggttgtctgtggttgggaatcttccgattccatggcatacgtcgtcggaactactgccaccatcgttgatattgcaatcaacgatgctgccatcttcttccaatgcttcaccgcatctctccttgtcctttgcctcgacccacttgtcgggcgtctcgttcgcctctacgtgaacgcaaacattatttgcgatgataccattacggcactgagactcagtgtgccagattccttatgcatataagcacttacgggggcagccgcccagcccgaacaccccccgtatgtccaaaagcccccttccaagccaatcactaatacccctcaatcggcaccccgctccgccagccgccccaaactgttatcaatttgttatctttaccgcgcttgcgtggacagagagcgctcagacctcgaagatcgccgcatattcgagagaacccgcctagtcaatgagatatggcttgaagacgcgctcggtgacggggatatggagcatcagcatggtgccgtaaccaaggatcaccagcaggaacagtccaccgggcatgtagaaccagctggccaccagcagcgtcacgaacacggcatccacgatgactagggccacggtcatcgcgatgtgggagatgccgaagatgaaggcgttcttcaaggtgccggccacggtgttctcgaagcgtgcctgaagcgcgaacacccattcgaaaccgataagccagaggatggtcagcgcgaatttgatgatgagcagcggcgtgatctgcaggacgatccatgaccagaccagtgcaatcagcgccaccaagaacggcatccacagcagtgtggctttgatgaagttggctttgaatgacttgaagtagttggcggttacgcctttgccctcgccctcgatggagcggcggcaagcatcatgaccggcggtcagggctgcaccgatggtgatgagcggaatagaggtgaccagcatcagaatgttgatccacacgccgtcaacaagatcgctccacgcgcgcatgaatttcgagtccggtgccagccagttcatcaactactccttgtgtcgcctgtggttcccctctctgaggggagctgtcatcgcagatggctgaggggagacttgatggagctcaggatactcccctcagtcggcttccgccgacggctcccctcaaagaggggagccggattggtggagctcagcccttgaccgctccgccttcggccctgcaattacggactcgcctacgacgaagctcatcattagcttcgccgctgtcgcggctcagcctggagcctgctggaagcccactgggcttccagccatgggctgacgacgcgagtcgtcagcccttgacggctcccgccatgacaccagagactatatatttctggcataccaagtagaagacgatgatggggatgattgccagcaccaggcaggccatcatggcgcccatatccacggaaccgtagccgcccttgaggtattgcacggcgaccgagatggtcttgtacttgccgaggtcgagcgtcaggtacggcagcaggtagtcgttccagatccacatggcttcgaggatgcccaccgagacgatcgacggcttcataatcggcaccacgatctggaagaagatgcgcggcactgacgcgccgtcgatcatggcggattcctcaagttcctgcgggatgcccttgatcacgccggtgaagatgaacacggccagaccggcaccgaaaccgaggtacacgatgcacaggccccacggggtattgagcttcagcatgtcggcgatcttggagagggtgaacatcaccatctggaacggcacgatcatattgaacaggaacagggtgtagagcagcttcgcggcccagttgttcacgcgcacgatccaccatgcgcacatcgaggtgcacaccagaatcagcaccaccgagccgacggtgataagcaacgtccagccgaaggaggcgaagaactgcgtggtctcgatgccgcgcacatagttctcaagtcccacgaacgccttgccggcaggcagggagaacgcgttcttggagatgtacgccttctgcttgaaggagttgatcagcaccaggacgatcgggaaaatccagaacagggagacaacggcaaacagcacggtccataatgcgccatgcttcacaggcttgttctcgttcatcaggctgccacctccttgctcgtggtgagcttgttctggatcagggcgatgaccgcgaccaggatgaagaacagcacggccttcgcctggccgacgccttcccagcccatacggccgtagaaggtgcgggtgatgttcagcgccagaccttcagacatgttgctcggcgcaccgttggtcaatgcgaggttctgatcgtagagcttgaaaccgttggtcacggtcaggaaggagcacacggtgatggacggcatcatcagcgggatgatgatgcggaacatggtctgccgtccgttggcgccgtccacggccgcggcctccagcacatcggtgggcagggcttgcaggccggcgatgtagatgatcatcatgtagccgatctgctgccagcacaccaggatgaccaagccccagaacccgtaggacgccttataggtcagggcgcggccccagtgggctagtacgccgttcaggagcagcagccagatgtagcccaggatgatgccgccgataaggttcggcatgaagaataccgagcggaacagcgtggagcccttgatcgccttggtcagcatgtaggcgatggcgaaggcgatcacgttgatcacgatggtggtcacgatggtgaacgcggtggagaagccgagcgcgtgcaggaattccttgtctttcaacgctttgccatagttcttaagccccacccattcaccgtcggtaacggtggtgaattcgcagaagcttaagtagacgcccatgatgaagggcaccaggaacccgatgatgaatgcggcgaatgtggggagcgcgaacagcgcccaccatctgcgtatcgccttgccagccatgctgatcatgacttttcctcctccttgagtccgctgcgttgtgacactgcatcgtgcgccggctgcggagttcaactcaatgcgagcttgccgatcgagaaccgcatgcacggcctgttctcgttcaagcctatgttcatagtaaacgtcgaatcattatatgtcaaacgttgtcattttaggcgtttcaagttcgagcacactccggctccagcaatcttctttcacctaagataatggctatataaagccaatctaacgccgacatagacactttgcaaacgtttgtaatacaatcgttgtcatcgccgcagatcaatcaatcagcatgtacactggagtcagttgtgcatgtgtattgcgattttccattcaacgcaagggggctgcaatggctacgagcattcaggatgtcgcccgcgaggccggcgtctccatctccaccgtctcacgttccttcaccaggccggatctggtgtcggccaagacccgcgagcgcgtgctcgccatcgccgacaaactcaatttctcactctcccgctcggctgcggccctgaaatccggccgctccctgcgcatcgcagtactgatgagcggccatatccgcctgtggttcaccgcctcggtcatcgaggggctcaacgaggtgctgcacacgcagggctacgatatttcggtattccagatttccagcatcgaggagcgcaaggaattcttcgagatgttgccggtacgccgtaacgccgatgccgtgattgtggcgtctttcgatatcgacaacaacgaaatcgcgcaactggcttcggtcggcgtgccgatcgtcggcatcaattcagtcgaacccggagcccgcggctttaccgccgccgtcaatatcgacgatgtgcagggctccacgctggccgcccgccatcttatcaatctcggacatcgccgcatcacctacatcagcaccaatcgcgaggtgtcgctgagcttctccgtgcaaagccgattcgactcattcaccgcctgctgccgcagggaaggcatcgagccgcaggttatcgtctgcaaggtcgatgacgatggacgttatgaaatcagcgacgtggtcaaccaactcataagccaagacgagatgcccaccgccatcgcatgccaggaggatggcattgctttgccgcttatgttccagctggagcgcaatggattctccgtgcccggcgacgtctcgttgatcggctacgacgatagtttctacaccggcgatatcggcctgaccaccatccgccaggatccggtggaaatggcccgcgtggcagcccgcatgacgctcgatctcattgacgaaaagccgattgagcaaccctacatcgtgttcccggcccagctgaaggtccgctcctccacctcccgcgttaagtaggctcacacaacaaagcccaccatagaaaaagtgtgaggcaaccgcacaataacgctcaatcgcacattgtggagaatggcgaaaaatcgccgattcatggccccacagcgtgcgattgagcgggtgcgtgcctcacacttttctgcggcggacgattttgtgcgagactcagcaatacaaagcggcgcccccggagaaggaaatggcaggggcgccgcggattgttgcttatcggctatgggactctatgagactcagtgcgaagcctcgtattcggaagcccaaccgtccacgaaggcggtcttgacggcatcccacttgccggtgccctgcgcgtactcgagcagtgcctggccgaccttgttcttccactcttcggacggcatcatggtgaagttccaagaaacctgggtcttgccggacttctgatcctcaacagcggcttcagtcagcgggttgtcaaacttgacatcatcgaaggtcttgaacggggtggtgaagcccatgtcctgagagatggccttcttgccggtgtcggaggtgatcacccaagacaggaagtcctcggtggccttcttgtcggcgtcggaggccttgtcgttgatgcaccagtagttctcggaaccagtggccaagccctgcttctcttcacccttgacaccggtgtagattggcatcatgcccacggattcggccttcatgccggccttctgcaggtcggtccaggcccaggtaccgttctggtagaaggcggcctcgccgagcgcgaactcggagttcgcatcatctccggtcttggcgctcagctgggtggggtcggtggtggagtcggcgatgtacaggtcgaagatcttcttgtagttcggcaggtaggtgcccttgatcttggccggctgctcggtgacgttgtcatccttgaactcgtagtaaagcggcagattggccaggtgggtcttgaagcgccagtcggagctggagtcgaagccggcggaggtgaacgcgcccttgatgccgagctcgtccttgcgggcctgcatgtcgtcggccacggccttcagggtgtcgaagttgtcgatttcgtccatggacatggccttggcgccatccagcgcgaagtacttgttgaggatgtccttgttgtagatcaggccgtaggtttccatcacgtacggcacgccgaccaccttgtcgccatccttcagggccacatcctggttggcgagctccttgtacacatccgtattggacatatcggcggtgtacttcttccagttctggtagccgaccgggccgttgacctggaacaaggtcggggcttcggttttggcgatttcggacttcagggtctgctcgtaggtaccggaggccgcggtctgcaccttgacctcaacgcccttttccttggtgtattccttggccagagcggtccactgatcagccgcttccggcttgaaattcaggtagtagaccttgcccttggcgtcatcgccggaggtcgagcttccgcaggccgccaaagcgccgagggacatcgcagcgacagccgccatcgcgactgctgacttgactgtacgattcatcatcgaacctttctctttcatcgtcgacccggccgtccccggtcaggacaggtacgctagcacgcacctttacgactatcgacatgcactattgtgcaacggtttgcttctttttgcaaacgatagcaatatcagcgcgtcataaatcatcattttcaggccattgtcaacaaatatcccattaattcagtcatttttgcctcattatcgcaatgcaagcgttcgcaatcatgagagcgctaacatatctttcatggcaatcgattgccacttatacccatcaaaaaaaacaacacgccgacgctatcgtttgcaaatcatttatcgacataccgcaattcccgccacaaacaataaaggcccgcccgcagtagcgggcaggccagcgcaatcgcagcgcaaccggggctaggcgttccaccgttcgatgacgttatctcccttatagacgctgagcaccgagtagtgcgccgtatccaaacgcagcaaccgtgcgaaatgcgggtccacgcccagccattgcgaggtgaggatgcgcaggatgtgcgcatgagccaccaacagcacattatggccgtctttcagcagcggcgtaatctcgtcgatggcgctcttggcgcgtgccgccgcttcttccagcgtctcgccaggcccggcatggaccggcacctgttcgcccgaaggcaaggtctcgacccagtcgccctccagcgtgggcgtcagcgagcgcggcccgtcacgccacacatcccattcaaaaccgctggcctcactcacctgctggcgcgtacgcccctcggctcggccgtaatcccattcagcgatgccgtccaacacaccgtggtccgcaaaaccagccaattcagcggtttggcacgcccgcttcagcggactggaaaacacacagctctggctgaatccttcggggaaggcctcgcgcaggcgccttccggcatccgctgcctgctgctcgccgaccgcggtcaacgggatgtccgtgcgcccggtatgctgcccggattcgctccacacggtctggccgtggcgcagcaacaccaaaaatccattgccgccacgagagttctcgacggcaacggtgccgttcacgttctgttcgctcatgcctccactctagtctgcgctcgttcatgactccaccattaacgcccatcttttgcgctgagatgattgagatgctattagactgagagtcatgagcgacgaaacgaacaccgacttcccctccagcgccgaccgcgcggtcgacagcctgcaccgcatcgacgagaaggtcaacaggctgcgcgaggaccggctcaacgaccctgattctctgggcgacaagctcatcaagtcggcagtcccagcgctggcaggcttggttgccggcaaagcattccagatgatatgggacaagggcacaagcaaacgcaatctgcgcaagggactggcggcagacgcgccgcaaagtctggcaatgagtctggcattcgccgccgtttcggccgcactcggcgcagtggtttcgcagctgtcggatcggggctccaaggcgttcgtcgaccaccgccatcgcaagcccagccgctaatcccccggttggatgatggtttctgttggctgactgatgactcatcgctggaatttcgtcaaggaaccatcagtcaatcgacaggaaccatcagtccagcacagttccgccacacaatatcggcatttcactgtgaggtaatccaccgtgacgtccggcgtctgccgtgcgacaataaagccatggttaccaacgcaacaatcgaggctcttctgggccgccgctccatccgtaagttcaaggacgaggccatcgacgacgatacccgcgccacgctcgaaaccgtcgcccaacatgccgcgtccagccagttccttaacgactggtccgccatccgtatcaccgacccggccaccaaagccaagctcgccgaattcggccatcagccgtatatcgccaccgcgccgttgctgtacgtgttcgtcatcgacgagcaccgcaacgcacgcatcgccgaacgcaagggtatcgatcccgcttccgacgaattccatctcaagtacagctatcgcttcacccaagctcagaacgacgcagtgctggccctgcacgccatggagaccgccgcctattcgctgggactgggctgcgtgattctcggctctctgctcaacaacatccccggccttatcgacgtgctgaatctgccggaatacacgtatccggtgctgggtctggccatcggcaagcccgatcagaacccgaccgtcaagccgcgcatgccgcgcacgatgcagttcttcgagaacacctacccggctgacgccgatggcgtactcgaccagctgcccgccttcgacgaggaagttcaccggtactacgatctgcgccaagccgaccgtccggtggacgctttcagcgatcaggtcgccacgatcagtcggcaggatgtcagccatcagacactggtcgacaaggccgccgctcagggcttccgtctggatcagtgagaccagaaccaacgagatagcctcggataggctcgtcactgagtcgtctcggtctcagcactgcgacgactcagttccaacacctcaacatttcatcaccggataccggcaaaattgcacaaccatcccgccggtgtcgcactatcaacaaacgttcacatatcagtcccattatgcggacaaccaacggccagttttgcaagaaaacccgccaaaccagcagtattcgcaccagtggtgggaatagactgcatgtggccgcaatgattacgaaccggaaaagagggactggatgcggacggtttggcaagtctttctacgcgattgcagacgtatcttacgcaatcccgttgccgttgtggtgacgctcggcgtagcaatgctgccctcgctgtacgcatggttcaacattctcgccaactgggatccctattcagccaccggcaatctgcaagtggccgtagccaatgaagaccaaggcaccaccaacgatctggtcggccatctcgatgcgggccggcaggtcgtcaagaaactcaagcagaacgacgaactcggctggcgcttcgtagacaatgaggaacaggccgtccacggcgtggagaccggcggatactatgcagccatcgtgctgcccaaggatttcagcaccagcctggtcgaatcggtgaccggaacctccaaacagccaaaaatcaagtattacgtcaacgagaagaagaacgcgatcgcgccgaaaatcaccgacaccggtgccaccaccatcgacgagcagatcaactccgccttcgtcaccacggtagccaccaccgttgcctcggccgtttccgaagcgggaggcgatctcgaccaagccaccggcaaagtccagcacgatacgatcaatgatctcaatacggtgatgtccacgctgaacaccgttcaggattcactcaccgacttacaggacacgctggcccaatcagacacgattctcgccgacgccaaacagaccaccgcctcactcaagcagaccgtcgcggccgcgcagaaggcctcccgccagtccggcacactgttgacggaaacacaggccgggtcacaagccttctccaccacactggtcggcgcgctcgacaccagttcagcacaactctccggactggccgttcacgtcaacaacgccgccggcagcatcaccggctccttcaacagcgcgcagaactccgtcgacaccatcaccaacacactttcggccccactgaatgccacccaaacgtcaatcagcgatctgaaagacgcgctgaccaaagccggcatcggcaaagacaccaccgacccggtcggccagaacatctggaaacaaatcgatgcgctcgactcattgatcagcaaacagcagacacagctcaacaccttccataccgacaccacacagttcatcaactccggtaaagacgccaccacgaatctttccggagccatgaccaacaccaccaccggcggcatcgcggcgctgaataccgcgcgcggctcgctgaccggcaccgtaatgccgtcgctcacctcatcattgaacagtttcgccgccctgaatggcacactggatggcacgttgacttcgttatccggcaccttggatcaggccgacggactgttcgaccagcttgtcgataccctgaaccaaacaaaaaccaccatcagcagcacgcaggattcgctgcgccaggtggccagcgatgtcgccaccgtacgcaccgatatcgccacgctcgatagttccgccgcttaccagaaaatccgggatacgctgcatctggatgacaagggattcggcgacttcatgggcaatcccgtcaccctgaccacgaaagtcgtgtatgccaccgacaattacgggtccgcagcccgttgtctaaatgaaagtgcaacacccgttagattggaaattgcctagaaaaccagtccgaagggatgtcgcacctatgggagaagtatattcgcacctgtcggaagaggaacgccaggtcatccagatcgaggtaggcaacggcgccagcatacgcgggatcggcgcgatgctgggccgcagcccgtccagcatcagccgggagatcaagcgcaacacatggttcccgtccaacgagaacgagtcgtaccgcccgtaccggccgaaaagactgaaggcggggccatggaccggccgctactacatcgccgggcccgcgcagcgcaaggccgaccgcaggagatccaagccacgaaagccctaccggctgtcgcacgaccgcctgtgggcgcaggtggccgaatggctgggccgcggctggtcgccgctgctcatcagcggcaggctgcgcgtcctgtggccggacgatgcgctcatgcgcgtgtgcccggagaccatctaccgatgggtctactccagcaggccgcttcgggaacgctgggcgcggtgcctgccgcgagggcacaggcggcgccgcaggcacggcggcaggaggacgtcgcgcttcccgatccccggccgagtgcccatctccgaacgcccgccggaggccgacggcaggagcgcgttcggccattgggaggccgacagcgtcatcggagtgggatgcaacctgcacaccgaggtggagagaaggaccaggttcctcatggcccgcatcgttccggacaagaccgccggcgagagcgtcggggcgcagctggacatgttctcgccgctgccggccggcgcgcgcgtcagcgtcacgcacgacaacggcaccgagttcgcccaccacgaaaggctgcgcgacgggctgggcatggccacgtacttcgccgacccgtactccagctggcagcggggaagcaacgagaaccgcaacggcatgatccgccggtatctgcccaaacgctgcgagatccggatggacatggcaaaggaggtcagggagatcgtcgacgagatcaacaaccgccccatgcgcgtgctcggctaccgcacgcccgccgaggcgttcgccgacgaactgttagaattacaggaccaacaagggtgttgcacttctaaatagacatcgggcagtcaccccgttctacacgaatctggcactgtgggtaggcggtttcgtgctaatcgccatctacaagcttgaggtcgaccgcgagggcattcgccgtatcaccgctacgcaagcatatcttggccgctggctgctgctggtcaccatcggattcctgcaagccgtcatcgccaccatcggcgatctggtgcttggcatccaatgcgagcatccgctgctgttcatcttggccgggatcttctgttcgttcgtatacatcaacattatttacgcactggccgtggcgttccgccatatcggcaaagccatcgccgtaattctggtcattgtgcagatacccggcgcctccggcctgtatccgattgaaatgatgccgaacttcttccgcgaactgcacccgtggctgccctttacctacggcatcaacgcgatgcgcggcccgattgccggcctgtacgcgaaccattactggctcgacatgctgcacctgttctggtatctgccggcggcgcttttcgtgggacttgtcatacgccggtatgcgatgaacctgaacgcgctgttcgaccgtcgtttgggagataccgacctgatgatcaccgagcacaacagcatggtgaacgaacaggtgagcttgaactccgtattccgcacggtgtccgacagcaaggaactgcgcgatatcatcgcccatcgcgcgcaccggttcttcgcacggtatccaaagatgatcgttgccggtctgacattgctgaccgtactcccgttcgtattcctggtactgctgttcgtcacccaagagaaaatcgccatgctgacctcctggattctgtcgattattcttatcgacgcctatctcattgtggttgaatacgcacgcgaaacctacgccatgcagcttggcgtcagtgccatgagtgccgacgagttccgcaatgtgatgctcaacggatatgtgtggcggcgtttccacggccacggacgtcacgaagcggcgatgggcagcaatccggatatcggcgaaaccactgaacgactcacaccgttcagtgatcaggccgccgagccgactgcgcacaccgcacagtccggtcagtccgggcagtctgggcagtctgggcaaggaggcgcacgatgaagcttatctggaaaatattcgtacgtgacgtgcgccaagccacccgcaatgtgatcgccgtaatcgtggctatgggattggtgattgtgccggcactgtacgcctggtacaacatcgccgccagctgggacccgtacggcaacaccaaggccttgaaggtcgccgtggcaaacgtggataagggctataagtccgatctgatgccgatcaccatcaacgtcggcgaaaccgtgaccaatacgctcagggccaatcatgaccttgactggcagtttgtggatcgtgctaaggccatcgatggcgtgaactcaggcgaatactatgccgcgctgattattccaaagagcttcagctccgatatgatgacgctgttttcaccgaagatcaagcacgccaagctcgaatactatctcaatgagaaaatcaatccgatcgctccgcatatcaccgaccagggtgctaccaccgtggccacgaccatcgaccagacatttgtgaagaccttggcgagcgtggcgctggatttggtttccaacgtggccgattacgcgcaaagcccgcaaatggagcagtacgtcaacaacgcctccagtcatattgccaccatgtcgtctcgtttgaccggcactgcgtcgcagatggattcctatgccaatctgctcggggccgccaacagcatcattgattccaccgataagctgctgggatcaacaggctcagctgcggccacaacccaaaaggcgttgaaacagacccgcaacggcgtctccagcctcgacaaggcattgtccggagccaccgatggcgtcggtacggcattgcagcaggccggttcatcctacgacaccattgccaagcaaatcgatgccgcttttgccgatgtgggctcacaatcctcacagatatcaaacaagctaaccgatatgcaatccaaagtggaggctcaggccgacagctttggaaagtatgccgccgctttacgagatctcgccaaacaagcggcttcactgcccgtgggcggagataccgttgccgctcaactgaacgcggctgcagaccaagccacaaaggcgcagcagagcatgcagcaagccgccaccgcgttgggcgatgcggccacgcacatagcaaacggtactgccgatgccgatacagcgcgtcgagatctgaaatcacaaatcgctgccgccaaacaatcgattactcaggcttcagacacgtacaagagcacgctgaaaccgcaactgaacaatctgacctcgtccatggacgaagtgaccacgcaggcaagttccgtaatcgacgggcttgcatcgaccgtaagcagcgtgtcaggtctttctggcggcgtttcagacagcctgacggacatccagtcggccttgactgacgcagctagcgctttgacccgttcggcgaagaaactcgacaacttgtcttcccaactcgcctctatcaccaatggcggcaccatcgacctgtctgcgatttcctctgcgaagcccgatgccattgcttccatgctggcggcacccgtagcggtcgaccgcatcgcgctctatcccgttgccaactatggttccgcgatggctccgttctacacgattttgtctatttgggtcggtgcgatcattctggtcgccatgttgaaagtatcgatttccgaccatgagaaggctcgtatcttagggttgggcaatgatctgccgctcggttcggaagtgggtcttcgcgaggccatgattgccgggcggattgccggaccggccgccgcgttggatgtgctgaagaagccgcgtgccgaggctcccggcaatgcgcggcagttcggtttacgcttgcaccacgaatatttcggccgatacatgattttcggtttccttgctttgctgcaaggtacgctggtgtgcctgggcgatatgttctatctcggcgtgcagtgtgagcatccgattcagttcttgatggtcgggtggttgtctgcactggtgttctcgaatattgtgtatacgctgaccctgtcgttcggtgatatcggcaaagccattgccgtagtactgctggttatgcaggtagccggttccggcggcacattccccattgaaacactgccgacgttcttccaggtcgtttctaaatggctactgttcccctatgcggtggatgcgatgcattcggccatggcaggctcattcggcatggaatactgggtttccatgggcaaactggcactgttccttgtcccctcattgctgttgggacttatgttgcgcaagccggtaattcgcttcaacgattgggttatccgcaaccttgaaagcaccaaggtgatgtgagtgttggacggagtgtgtccgaacgccctgaacgcttagcagcctacgacctgacgtgtttggaccgtaacctgcctcagatacggcgttggcgaggcctgtggagcttctgacgctaacgtctacgtggcttgtagccctttttacgactgtgtggcttgagttgctggttcagcggtacatgccggtaactggattgtggatcgcgatgtgtgaggtgccagcatccgcaatattcgcaacggtacacccatagctcggctccacgctcgatcaggctttgatcagcggcacgctgagcctgcgccttatcgtggtacatgattttattcgacgtggcgcaacgtttaggggtgaagtaatgcatagcagaagccagtgtagagcgaccccataaccaagccagtttctggctcccctctggaggggagctgtctgcgcggcggaccggggggcccgggcgtcgggctcccacggtcgcggacgcgccgcgtcgttcggcctcgccgtcggggctggccgggaatggtcccgggcgtgggtctcatgggtatgcggggaggtcccggtgcccgtgcgggttcgggccggggccggtttcggatatggggaaagccccttggggcgtgtgctccaaggggcttcctgtacgtgtgatgcggcggcgtgctactctcccacaccctgtcgggtgcagtaccatcgccgtgccaggccttagcttccgggttcggaatgggaccgggcgtctcacctgggccatggccgccgcaaatcttctcttgtacggtcagacgctggggtctgccggcctgtggcggcctgggaaccggacagcggacgcggatatgccgatgtttcgtcttgtggccagacaatgctcattgccgtctggtgccgtttgcaggaggaagatgcggtccaaccgccaagggttggaatgttagtgttgcctttcgtccgttagtaccggtcggctccacccctcgcggggcttccacgtccggcctatcgaccacgtgttctgcatggggactacaggaactcgaaggttccacggaatgcttatcttggagcaggcttcccgcttagatgctttcagcggttatcccttccgaacgtagccaaccggccgtgccactggcgtgacaaccggcataccagaggttcgtccacccaggtcctctcgtactatgggcaggcctcctcagcattccaacgagcgcagaggatagagaccaaactgtctcacgacgttctgaacccagctcgcgtgccgctttaatcggcgaacagccgaacccttgggacctgctccagccccaggatgcgacgagccgacatcgaggtgccaaaccatcccgtcgatatggactcttgggaatgatcagcctgttatccccggggtaccttttatccgttgagcgatgccgcgtccgtacaccggcaccggatcactagtcccgactttcgtccctgctcggaccgtcgtcctcgcagtcaagcccgcttgtgcacttgcactcgccacccgattgccaaccgggctgagcggacctttgggcgcctccgttactctttgggaggcaaccgccccagttaaactacccgccaggcactgtccctgaacaggatgactgttcgaggttagacatccaatgcgaacagagcggtatttcaccttacggctccgcgcgatctggcgaccgcgcctctcggcctcccgcctatgctacacaatccacaccgaatgccaataccaaggtatagtaaaggtcccggggtcttttcgtccttctgcgcttaacgagcatctttactcgtactgcaatttcgccgagctcctggtcgagacagtggggaagtcgttacgccattcgtgcaggtcggaacttacccgacaaggaatttcgctaccttaggatggttatagttaccaccgccgtttaccggggcttgaattcaccgcttcacccgaaggctgacggatcctcttaaccttccggcaccgggcaggcgtcagtgcatatacagcggcttgcgccttcgcatgcacctgtgtttttggtaaacagtcgctaccccctggtctgtgccacccccaaaagctcccacagcaagcgtgttcaccatcgggggtctcccttaaaccgaaggaacgggagtgatttgccgagttccttgaccaggattcgctcgatcgctttggtattctctacctgaccaccagtgtcggtttggggtacgggcggctttgagcctgacgccgaagcttttctcggcagccgggatcaccggatatcgggccataaggcccccatcatcgcacctcggacccatgcgggacggatttgcctgtcccacgccctgcgtgcttgaccacggaagaccacctccgcggccggctacccttctgcgtcactcctgcgctgacctactacaaggaccggtcccaacaggccagggcatcccgcccccgaaggagcagtaagcccggacccggaggttagtactccaagcctcggttttggcggctgaaagccggtacgggaatatcgacccgttcatccattcgactacgcctgtcggcctcgccttaggacccgactcacccagggacgatgaacgtggccctggaacccttggtcatccagcggacgggatcttcacccgtctctcgctactcatgtctgcattctcactcccatgaagtccacggcgcgttcacacggccgcttcgcccctcatgggacgctctcctacccagtacaaaatactgccgcgtcttcggtggtgtgcttgagccccgctacattgtcggcgcggaaccactagaccagtgagctgttacgcactctttcaagggtggctgcttctgagccaacctcctggctgtctatgcgactccacatcctttcccacttagcacacgcttcgggaccttagacgacggtctgggctgtttccctttcgacgacgaagcttatcccccgccgactcactgccgggatacgcgtcaccggtattcggagtttggttgctgttggtacccgatacgggcccgcaagcatccagtagctctacccccgggacgtaatgacccgacgctgcacccaaatgcatttcggagagaaccagctatcacggaatttgattggcctttcacccctagccccaagtcatccccccggttttcaacccaggtgggttcggtcctccacgcggtcttacccgcgcttcaacctgctcagggctagatcatcccgcttcgggtccaggacacgcgactcaaacgccttttaagactcgccttcgctacgcataccccacacgggttatgctcgccacatgccactgactcgcagactcatttttcgataggcacgccgtcaccccacaaaagggctccgacggattgtaggcgcacggtttcagagactgtttcactcccctcccggggtacttttcacctttccctcacggtactcgttcgctatcggtcagacaggaatattcaggcttacccaacggtctgggcggattcgcacggggttccacgggacccgtgctacttgggagacgcgatcggcagaccatgcgcgttcaggtacggggccctcaccctctgcggcccggtattcaacccggttcccctgacacatggttttctgcaactgccggccggcccgtcggagccggcgcacgcgatcccgcaacaccccgcgcgcaacccccgacgggtatcacacgcgcaaggtttggccatcatccgctttcgctcgccactactcacggaatatcctttcctgcaggtactgagatgtttcacttccctgcgtaccccccggccgaagccggtaccgacccatgacggtcggtgggttcccccattcggaaatcctcggatcaaagccctgttggcggctccccgaggcatatcgcagcctcaaacgtccttcatcggtcctgtctgccaaggcatccaccatacgcccttgcaagcaacacacaccacgaaagtgcatggccgcaagattcctctagcaaattcccagacgacaaatcatcacactaaaaatgatcacaaaacgatcgaaacgaacaatagagttcgattcgaaatcaacagcaaaacaaagattcaaaaacccttgttttgctcgcgtccactatccagttctcaagccaccacgcaccgccacgccatcgcgccggcacacggccggcccccaggcacgacgggcatcgaatcgcgccaggcgaaaagcctggggtggcgatccgggagcccaaaagcgcatccataccaccccggcacccaccgcacgaccggcagggcaaagccaacgacgtcttccacaccagcaaccccgccgccatcgcaccatgcgacgcgcggggcgcacaccgtcggacgaacctccgactgaattctccgtagaaaggaggtgatccagccgcaccttccggtacggctaccttgttacgacttagtcccaatcacgagcctcaccttagacggctccatcccacaaggggttaggccaccggcttcgggtgctgcccactttcatgacttgacgggcggtgtgtacaaggcccgggaacgcattcaccgcgacgttgctgattcgcgattactagcgactccgccttcacgcagtcgagttgcagactgcgatccgaactgagaccggttttcagggatccgctccgcgtcgccgcgtcgcatcccgttgtaccggccattgtagcatgcgtgaagccctggacgtaaggggcatgatgatctgacgtcatccccaccttcctccgagttaaccccggcggtcccccgtgagttcccggcataatccgctggcaacacggggcgagggttgcgctcgttgcgggacttaacccaacatctcacgacacgagctgacgacgaccatgcaccacctgtgaacccgccccgaagggaagccgcatctctacgaccgtcgggaacatgtcaagcccaggtaaggttcttcgcgttgcatcgaattaatccgcatgctccgccgcttgtgcgggcccccgtcaatttctttgagttttagccttgcggccgtactccccaggcgggatgcttaacgcgttagctccgacacggaacccgtggaacgggccccacatccagcatccaccgtttacggcgtggactaccagggtatctaatcctgttcgctccccacgctttcgctcctcagcgtcagtaacggcccagagacctgccttcgccattggtgttcttcccgatatctacacattccaccgttacaccgggaattccagtctcccctaccgcactcaagcccgcccgtacccggcgcggatccaccgttaagcgatggactttcacaccggacgcgacgaaccgcctacgagccctttacgcccaataattccggataacgcttgcaccctacgtattaccgcggctgctggcacgtagttagccggtgcttattcaacgggtaaactcactcacgcttgctccccgataaaagaggtttacaacccgaaggcctccatccctcacgcggcgtcgctgcatcaggcttgcgcccattgtgcaatattccccactgctgcctcccgtaggagtctgggccgtatctcagtcccaatgtggccggtcgccctctcaggccggctacccgtcgaagccacggtgggccgttaccccgccgtcaagctgataggacgcgaccccatcccataccgcgaaagctttcccagaagaccatgcgatcaactggagcatccggcattaccacccgtttccaggagctattccggtgtatggggcaggtcggtcacgcattactcacccgttcgccactctcaccaccaagcaaagcctgatggatcccgttcgacttgcatgtgttaagcacgccgccagcgttcatcctgagccagaatcgaaccctccacaaaaaaacttcatgaaaagcatccgaatagatgactctcaaaacaaaaattgacgagcacgtccttaaggaaggacgccctcaaaaaacctcacccctcatcaaaccctcccgggtacccgaccaccacgacaggcaatcaggcgaggaatgaactggcaatcattgactataaagaagtagtacaaacacgctcttgagttctcaaaccaccaccactcacccacctcgcagctccccggaggagaaccactcgctgagcggcagcaaggaaataacttacacgcattcacggactcgcgcaaatcgggcgcacgaagataagcccaaatcgttgaaacgacaggcttcgctcggcgtgtcgaaatcgacgtttcgcacgtctatatcttcagtctagaactagatatcgtcgaaaattggattgaaaattttggtcgatgggcgtgtcgcgaattacctcttacggcgcatgtggtgcaccgccaattatcggaatcatcattgatccagtacaccgataagaaccattatgtccggatcactatctgctcgccagtcgcgcaccaatcaaccgcctggtagcgatgcggttgccgtatcgcttgccttggcacgaccaacgaccgaatggcatcagcacattcagaaccgccggtccgatccatgcatcgcagcacagatcagtcgtggtcccacgggtatggggaggccccgttgccgtgtgggtgccggaggtgtcctgtttgtgtccgggcatgcgagaagccccgggtgtttttgtgggggtgtgtgggtttgggtcgtgagtgtttcgggtatgcgaaagccccttggggcgtgtgctccaaggggcttcctgtacgtgtggtgcggcggcgtgctactctcccacaccctgtcgggtgcagtaccatcgccgtgccaggccttagcttccgggttcggaatgggaccgggcgtctcacctgggccatggccgccgcaaatcttctcttgtacggtcagacgctggggtctgccggcctgtggcggcctgggaaccggacagcggacgcggatatgtcgatgtttcgtcttgtggccagacaatgctcattgccgtctggtgccgtttgcaggaggaagatgcggtccaaccgccaagggttggaatgttagtgttgcctttcgtccgttagtaccggtcggctccacccctcgcggggcttccacgtccggcctatcgaccacgtgttctgcatggggactacaggaactcgaaggttccacggaatgcttatcttggagcaggcttcccgcttagatgctttcagcggttatcccttccgaacgtagccaaccggccgtgccactggcgtgacaaccggcataccagaggttcgtccacccaggtcctctcgtactatgggcaggcctcctcagcattccaacgagcgcagaggatagagaccaaactgtctcacgacgttctgaacccagctcgcgtgccgctttaatcggcgaacagccgaacccttgggacctgctccagccccaggatgcgacgagccgacatcgaggtgccaaaccatcccgtcgatatggactcttgggaatgatcagcctgttatccccggggtaccttttatccgttgagcgatgccgcgtccgtacaccggcaccggatcactagtcccgactttcgtccctgctcggaccgtcgtcctcgcagtcaagcccgcttgtgcacttgcactcgccacccgattgccaaccgggctgagcggacctttgggcgcctccgttactctttgggaggcaaccgccccagttaaactacccgccaggcactgtccctgaacaggatgactgttcgaggttagacatccaatgcgaacagagcggtatttcaccttacggctccgcgcgatctggcgaccgcgcctctcggcctcccgcctatgctacacaatccacaccgaatgccaataccaaggtatagtaaaggtcccggggtcttttcgtccttctgcgcttaacgagcatctttactcgtactgcaatttcgccgagctcctggtcgagacagtggggaagtcgttacgccattcgtgcaggtcggaacttacccgacaaggaatttcgctaccttaggatggttatagttaccaccgccgtttaccggggcttgaattcaccgcttcacccgaaggctgacggatcctcttaaccttccggcaccgggcaggcgtcagtgcatatacagcggcttgcgccttcgcatgcacctgtgtttttggtaaacagtcgctaccccctggtctgtgccacccccaaaagctcccacagcaagcgtgttcaccatcgggggtctcccttaaaccgaaggaacgggagtgatttgccgagttccttgaccaggattcgctcgatcgctttggtattctctacctgaccaccagtgtcggtttggggtacgggcggctttgagcctgacgccgaagcttttctcggcagccgggatcaccggatatcgggccataaggcccccatcatcgcacctcggacccatgcgggacggatttgcctgtcccacgccctgcgtgcttgaccacggaagaccacctccgcggccggctacccttctgcgtcactcctgcgctgacctactacaaggaccggtcccaacaggccagggcatcccgcccccgaaggagcagtaagcccggacccggaggttagtactccaagcctcggttttggcggctgaaagccggtacgggaatatcgacccgttcatccattcgactacgcctgtcggcctcgccttaggacccgactcacccagggacgatgaacgtggccctggaacccttggtcatccagcggacgggatcttcacccgtctctcgctactcatgtctgcattctcactcccatgaagtccacggcgcgttcacacggccgcttcgcccctcatgggacgctctcctacccagtacaaaatactgccgcgtcttcggtggtgtgcttgagccccgctacattgtcggcgcggaaccactagaccagtgagctgttacgcactctttcaagggtggctgcttctgagccaacctcctggctgtctatgcgactccacatcctttcccacttagcacacgcttcgggaccttagacgacggtctgggctgtttccctttcgacgacgaagcttatcccccgccgactcactgccgggatacgcgtcaccggtattcggagtttggttgctgttggtacccgatacgggcccgcaagcatccagtagctctacccccgggacgtaatgacccgacgctgcacccaaatgcatttcggagagaaccagctatcacggaatttgattggcctttcacccctagccccaagtcatccccccggttttcaacccaggtgggttcggtcctccacgcggtcttacccgcgcttcaacctgctcagggctagatcatcccgcttcgggtccaggacacgcgactcaaacgccttttaagactcgccttcgctacgcataccccacacgggttatgctcgccacatgccactgactcgcagactcatttttcgataggcacgccgtcaccccacaaaagggctccgacggattgtaggcgcacggtttcagagactgtttcactcccctcccggggtacttttcacctttccctcacggtactcgttcgctatcggtcagacaggaatattcaggcttacccaacggtctgggcggattcgcacggggttccacgggacccgtgctacttgggagacgcgatcggcagaccatgcgcgttcaggtacggggccctcaccctctgcggcccggtattcaacccggttcccctgacacatggttttctgcaactgccggccggcccgtcggagccggcgcacgcgatcccgcaacaccccgcgcgcaacccccgacgggtatcacacgcgcaaggtttggccatcatccgctttcgctcgccactactcacggaatatcctttcctgcaggtactgagatgtttcacttccctgcgtaccccccggccgaagccggtaccgacccatgacggtcggtgggttcccccattcggaaatcctcggatcaaagccctgttggcggctccccgaggcatatcgcagcctcaaacgtccttcatcggtcctgtctgccaaggcatccaccatacgcccttgcaagcaacacacaccacgaaagtgcatggccgcaagattcctctagcaaattcccagacgacaaatcatcacactaaaaatgatcacaaaacgatcgaaacgaacaatagagttcgattcgaaatcaacagcaaaacaaagattcaaaaacccttgttttgctcgcgtccactatccagttctcaagccaccacgcaccgccacgccatcgcgccggcacacggccggcccccaggcacgacgggcatcgaatcgcgccaggcaaaaagcctggggtggcgatccgggagcccaaaagcgcatccataccaccccggcacccaccgcacgaccggcagggcaaagccaacgacgtcttccacaccagcaaccccgccgccatcgcaccatgcgacgcgcggggcgcacaccgtcggacgaacatccgactgaattctccgtagaaaggaggtgatccagccgcaccttccggtacggctaccttgttacgacttagtcccaatcacgagcctcaccttagacggctccatcccacaaggggttaggccaccggcttcgggtgctgcccactttcatgacttgacgggcggtgtgtacaaggcccgggaacgcattcaccgcgacgttgctgattcgcgattactagcgactccgccttcacgcagtcgagttgcagactgcgatccgaactgagaccggttttcagggatccgctccgcgtcgccgcgtcgcatcccgttgtaccggccattgtagcatgcgtgaagccctggacgtaaggggcatgatgatctgacgtcatccccaccttcctccgagttaaccccggcggtcccccgtgagttcccggcataatccgctggcaacacggggcgagggttgcgctcgttgcgggacttaacccaacatctcacgacacgagctgacgacgaccatgcaccacctgtgaacccgccccgaagggaagccgcatctctacgaccgtcgggaacatgtcaagcccaggtaaggttcttcgcgttgcatcgaattaatccgcatgctccgccgcttgtgcgggcccccgtcaatttctttgagttttagccttgcggccgtactccccaggcgggatgcttaacgcgttagctccgacacggaacccgtggaacgggccccacatccagcatccaccgtttacggcgtggactaccagggtatctaatcctgttcgctccccacgctttcgctcctcagcgtcagtaacggcccagagacctgccttcgccattggtgttcttcccgatatctacacattccaccgttacaccgggaattccagtctcccctaccgcactcaagcccgcccgtacccggcgcggatccaccgttaagcgatggactttcacaccggacgcgacgaaccgcctacgagccctttacgcccaataattccggataacgcttgcaccctacgtattaccgcggctgctggcacgtagttagccggtgcttattcaacgggtaaactcactcacgcttgctccccgataaaagaggtttacaacccgaaggcctccatccctcacgcggcgtcgctgcatcaggcttgcgcccattgtgcaatattccccactgctgcctcccgtaggagtctgggccgtatctcagtcccaatgtggccggtcgccctctcaggccggctacccgtcgaagccacggtgggccgttaccccgccgtcaagctgataggacgcgaccccatcccataccgcgaaagctttcccagaagaccatgcgatcaactggagcatccggcattaccacccgtttccaggagctattccggtgtatggggcaggtcggtcacgcattactcacccgttcgccactctcaccaccaagcaaagcctgatggatcccgttcgacttgcatgtgttaagcacgccgccagcgttcatcctgagccagaatcgaaccctccacaaaaaaacttcatgaaaagcatccgaatagatgactctcaaaacaaaaattgacgagcacatccttaaggaaggacgccctcaaaaaacctcacccctcatcaaaccctcccgggtacccgaccaccacgacaggcaatcaggcgaggaatgaactggcaatcattgactataaagaagtagtacaaacacgctcttgagttctcaaaccaccaccacaccagccagacgggaaaccaaccagaggaaggaacccgccgcgctgagcggcaacaggtgaataacttacacgcatgtccggattcacgcaaatcaaggcgcacaaaaaccccaggaatcggcataacagcgcggttccctcggcgtgtcgcacagagcccactttgctctgatgaggctaggttaacccctcaaatgtttctgaaaagcatcaaatccactattcggctggcgtgtcgcgagagttttcagcttgtcggccctgcgttcatctctcggcaaccacactgccggcgcacaatcggcgcatgacagcgctccgtcatcggatttcgttcatgaatcgcgggtatacctgtagttatgaccaagaagattgctgtattaaccggggcgggcatttccacgtccgccggcatccctgatttccgcggtccggacggtgtgtggaccaagcatcctgaccaaatgagcgtttacgacatcgatctgttcctgcgcaacaaagaggaccgcgagtactcctggcgctggcaaaaggaatcgccagtatggaatgcgcagcccggcactgcgcataaggcgctggtcaagctggaacaagccggcatgctgacgctgctggccacgcagaacttcgatgcgctgcatgagaaggccggcaacagcgacaacgtcatcgtgaacctgcacggcactatcggcacctcgcattgcatgaagtgccatcaggaatatgccacggcggacatcatggcccgtttggatgaagagcccgacccacattgccatcgcaaactgaagtatcgtggcgatatgccgtgcaatggcattatcaaaaccgatgtggtgtatttcggtgaggcgttgccggacggcgcgatggagaagtcgtacagtctggccaccaaagccgacgaactatgggtaatcggatcgacccttgaggtgtacccggcggcgagcattgtgccggtggccgcgcaggcgggcgcgcccatcaccattatgaatatgggtcacacgcaatatgaccatcttgcgagccgcttgattcatgaggatatcgccgttgccctgccgaagttggtggacgagacgattgcggagaacaagtagccctcagcataacgaaagcgccggtgggtgggttaagcaactgatgattgtcggttaaccacccaccggcgcttttgcgccacctcccgccagcgggaggtattggagcacacttctgcgcggcttcccgccagcggtattggaatcagtagatgcgcttgggctggaatccggcttccctgagtgccgcgaggatgcggtcgatgtgctcggggccgttggtctcgaccgtgacgccgagagacaccgcgttggtgtagtggccggatgccttgaactggtcgtgatcaagctgaatgacgttggcgcgctgctcggcaagcagggtggccaccttgacgagctggcccggagtatccggcagctcgacctcgaagttcatgatgcggccgcgggcgatcatacctttctgaatcaccgcacccatggtcacggtgtcgatattgccgccggacataatcggaaccaccacgtgcgggccggtggcggcggcgaacttgcgcgaacgcaggttcaggtgttccagcgcagccagcgaaacggcgccggccgcctcgaccaccagcttatgcttctcgagcatgagcagaatcatttcgttgatgtcgcgctcggtgacggtgaccagatcgtccaggaactcgttaatcagagcgaagggcaggtcgccggggtgcttgaccgcaacaccttcggcggaggtaaccacatggtcagccggagacacacgacccgcggccagcgagtccttccaggccggtgagccctccggaatcgcaccgattacgcgcacttcaggcttgaatgtcttgatggcgagcgccacgccggcacccaggccaccaccaccgagcggcacgaccacgtcagtgacgttcggcacgtcttcaaggatctccagaccgatggtgccttggccgcagatgacttcgtaatcgtcgaatggcggcacgtaaatcatgccttccttgtcggcgagctcagcagcgtgggcggcggattcatcgaacacatcgccgtacagcaccacgtcggcaccgtaggccttggtggcatcgaccttcagcggcggggtgatctgcggcatgcagatggtggccttggctccacgctcgcgggccgcataggccacaccctgggcatggttgccggcagacgcggtgacgatgccgtgagcgatctgctcttcggtgagcgaagcaatcttgttataggcaccgcggatcttgaaggatccggtgacctgcaggttttccggcttcaggagaatctcatggccggtcatctcgctcagcaccggagaaggaatgatctccgtgtggcgggcagtgcctttgagtcgttcggcggccagcttcagttcggctgcatgatcacgttgcagcgccttcaaaacatccttttgttccatagctttccattgtaagcaccacaatgccgagagacaccagctatctcgcttcacagaggtacattcggccttttgcagacagctatctgttttcataggggtaccgagaagcaaaaaccccgggtataagccttgattttcaatgcttatacctggggtttcgacgttacggtacctctctcaagacagatagcatttcgggatagccccgaagtacctctttgagcggagaaaggcactcaatgcactacaactggatgacggctgcctcccacgggtcgagctcgcggttggcaagggaggccacggtgtgcggagcgtcatacgtgctgatcaccacattcggctcggcgattccgacggcggttagttcggcagcctcacgtggcaggtcaacggttcgactggacatattgactacgaccaacaacttctcagcgtcgagctcacgggtaaaggcatagacgtgcggatcagcggcgtcaatcagtcgccagtcgccggcggccacgaccgggctgttgtgacgcagcgcaacgagttgcttgtagaaggagtacaccgaatccggatcatcgaattcaccggcggcgttgatctcggcatgattcggattcacggaaatccatggctcagtggcggcgtccggagcggtgaaaccggcgtagccggaaccgtcccattgcatcggagtacgcgcgttgtcacggctgcgcgcggccagaccggccatcattgactcagacgactgcaccttggcctcctcgaccctctgccggtaggcattcaaggattcaaggtcacggtactggtcgagacgcgtgaagtgggcgtcggtcatgcccagttcctcaccctgatagatgtacggggtgccgcggtgcatgtgcagcatcaggccaagtgccttggccgaacggacgcgggattcctccgcggagtcgtcgccccagcgggagaccacgcgcggctgatcatgattgccggtgaacaagctggcccatcctgcgttctgcacggcagtctggtaaccggccataatgctcttgaatttcggcaggtcaagcggcagcggcttccacttggtaccttcgcaatcaaaatcaacatgctcgaacaggaagagcatgtccaattcaccgttgcccggatcagtgatgtgctcgttacgctgagccgtgacgcctggcgcctcgcccacagtcaggaagccttcacgcccctcgaatacctcacgtcgcatttcagccaggaattcatcctgacgggggccgtccgcacagaacggattcgggttggaatagccctcctcgcccacaggaagatcctcaagctccgagccgtactcgcccggcagcttgccgttcgaatcggtgcgcttggagatcagggtgatgacgtccatgcggaagccgtcgacgcctcggtcaagccaccagttcatcatgtcgtacacagcgcggcgcacggcagggttctcccagttgaggtccggctgcttcttcgagaactgatgcaggaagtattcgccacgctcggggcagtattcccatgcggagccgccaaagtaggagccccactgattgggctcggcgccgggctcgccgggcgtggtgccgggacgagccggacgccaccaataccagtcggcgtgttcgtcgtctttgttcttggatgcttcaaaccaggcgtgttcatcggaagtgtgattgacaacaagatccatcacgatcttgagcccacgcttgtgggcctcggccagcagctcgtccatatcgtcgagcgtgccgaacagaggatcaatgtcctgatagtcggaaatgtcatagccgttgtcgtcttgcggagacttatagaccggggatagccacagcacatccacgccaagatcagctaagtaatcaagacgcgacgtgatgcccttaagatcgccgaatccatcgccgttcgtgtcttggaaagagcgcgggtaaatctgatagaccaccgcgttggaccaccacggattgggggtggcgccgttggtgcggatggcgtcggggattgcggtacgttgcgaagtagtcatgactccgaacctttctacgtgggtgaacgaacatcgttgttgaccggatggcttgtagttatattgaaacagcccgatggtttcattcccatcgggctgttattttggtgtggcggaaagtaattacttgagcgggcggccgatgctcccctcagtcagcttcgctgacagctcccctcagagaggggagctggagtgaaacgctacttgaccgctcccctcatcacaccaccgacgacccacttctgggcgaagatgtagacgatgaggatcggggccatggccatcaggtagctggagaaggccatcgggtagttggtggcgaactgcgagctgaagacgtactgggcgagcgggatggtctggttcgactgatcggtcagaatgatcaacggcaggaggaagtcgttccaggcccacagcgcggtcaggatggcgatggtggcgttaatcgggctcatcagcgggaagatgatggtccagaagatgcgccaggtggatgcgccatcgatgcgggcagcttcttccagcgataccggaatcgaacggatgaagccggtggcgatgaacaggttcgtgcccaggccgagcaccgtgtacagaatgatcaggccgacctggttgtccaggtgcagggagcccatctgcttcgcaatcggcagcatgacgaccgggaacggcacgaacatggcggcgatgaagaagtagtacaggaagcggaagaagcgcttgtccatgttgcgggccacggcgtaggccacgaaggtgttggtcagcagggtgagcaccacggcggccaccgtgatgatcgcggagttgagcgcggccttcgggtagttgaccttggcggaggcgtcggcgaagttatgccactgccacgaggtgggcagggcgaaggtgccggcttcggccggggtcttcagcgcggtgacgatggtgaagtagagcgggatcagaatggtcaggctcagcacggccacggcggcggtcagccaccagttgatcttgtggtctctgcggaacttggcgggcttgccggacttggacggggtaactgttgcagtagtcatttcttatcctcccctaaatcagatctgttcctggctgcgggagatgcgcagctgcacgaaggcgatgatcgccagcacgatgaagaagagcacggcgtttgcggtctggtaggcgtactcgccaccggtcaggccacccttccagatgaggtaggtgacggtttcggtggaggagttcgggccgccctcggtcaaggcgacgacctgatcgaaggtgccgagcgcgttcttcatggacagcacgaggttgatggtgaagaacggtccgatcagcgggaatgtgatcttccagaacttctgccaggcgttgacgccgtcgatggcggcggcctcgtagatttcgtcgtcgatggtctgcaggccggcgaggtagatgagtaccgagtaggcgatgccctgccagacggcgaggaagacgattgggatccagctgagttgctcattggtcaacaacgaggtggacagccacttgatgcccagcgccttgccgagctcgggcagcgggttcatgaagatgtacttgaacacgtagccgatgaccagcacggagagggtgtaggggatgaagaagacggctcggaagccattcttgaaggcgatcttcgagttcagcagcaccgacaggaacagggcgatcacattaatcagcaccgtgatgagaatggcgatgaggaacgtgaacaggtaggcgtggcccacgcggttgtcttggaagagggcgatgtagttcttcaggccgatgaacttgtaatcgccgtagccctgcgagttggtgaaggaatactttatgccgtcaagaaatggcaggtacaggaagaaggcgaaaatgatagccgccggaaccaccatccagtagtaggcggggtccaccttgcgggtggagaaggcggagaccttcttcttggccggtttcttggcagcggtcttggttgcggttgcgtgtgacatgatgttctcctctcctaccgatcactcgaaggtcctggcttggaccttgtcccattcggtctgcatctggttcaggaagcggtcggtgttgccggaggtcaccatggtctgcaggtagccgccgatgttgatggacgaaggaatgtagtggtcgcagaagtcggccagtcggttttcctcgaagaacgggcgcacggtttccagcgcatcgttgccgaagtaggtgtccttcagcggcgtgatggcggactgggcgtcggcgtaggcgtcaagctgatccttctgcatgaggaattcgacgagcttcatcgcttccttggggtgcttggtgttcgcaccgatggtgagcatcacgtcgtcgccggcggtgaggatctgctcgctggcgtcatcggtggccggcatctgggcgaaaccaagttcgatatcggggttgatcagcaggatctgcgggatggcgtaggtgccgagcgggatgatcgcggccttgccttgggcgaagttctgcgtgccctgctggtaggtgacgccggtgtccgcagtggagtaggtgaagagctcggattccttctcgactgtggtcttccacagttcctggaacgtggtcttgccttgcttgagctcggtgtacttcgattcgggaaccagcgtgccggccagggaggcgagcggtgcctgggtggtccagccgtcggccacggaaccctgcagcgggttgatgccggcgtccttgaaggtgttgagcatatcggtgaactcgctccaggtggtcggcgggttctccgggtcaaggccaaccttgcggaacagagccttgttgtagatgtagccggaggcgttacccgcgaagggcaggccatacaggcgcttcttggaggaatcggtggtctgcaccagattcttggcgatctgcaccatgccggggttgagggtgtccacaatgggttcatcggtgaagtcgtagaacacaccggaggcggcgaagttgccgaagctgatgtcgccgttgaaggtgatcacgtccggcacgcgattcttgacgaaacgggtgcgcagatcggtctgggcgttggcggagttgttgatgttgaccttgatggtcgggttctgtttctcaaagtcggcgaccatggacttgaactggtcggcggcctcggacttgaactggaagaaatccagcgtgacggtgcctgcggtgctggagccgcagcctgccaggccgaagccgacggcgatcgcgcacaccacggcggcggtgcgcacggccagacgcttcagtctaggcgttgcatgtggggaatcggacagcataattgttgactcctttatctttcttttcctccggcttcggtgccggcggttcttccactttctaaggtaacggttcggccatttcattcccagcgccagcgagcccacttgcgcaagcaacaaaaagcgcggtattttgtgattaacgcaataaatacagcgaggggggcttgcatgtctgatgccaacgcgattccacagtggttttccggatccgagcatacgcatcgcgtggcggcggcaattgcccaatacgggccgatagcccgcactacgttggcacagatgctgggactgagccaaggggccttgtcccgcatcaccagcgatctgatctacgccggggtgatcgaggagcttccggccgaggccggcccgtcaggcaagctgcccgagcgattcacgccaagggaaagttcggatcgtcgcggacgcccgcagacttcgctggtgttgtgttcgaacgcacgcaccttcattggtgtcaaggttcatgggatgtcgattgtggccgctgcggtgaacgcgcatggcgaggtggtgtccggccggcacgaggtgccgatcggggcggatcaatcggctgagtatgtggtgtcggccatcacgcggctggtgcgcgaatgctccgccgatatcgcctcttccggactgccctcccccactgcggtgggcgttgcggtaggtgggcatgtggtcgacgattcgatcgtgacgttcgcgccgttcctgcattgggacggggccacggacttggggacgatggtcacagaggcgaccggcctgccgtgcggggtgttcaatgatatcgattctctgctggtggatgcctcctggttcgggccgggtgtcggcgtggatatgttcgccgtggtgaccatcggcgtgggcgttggttattcgctggccgtgaacggcaagccagtgcagtacccggataagagctatggtctggtgggccacgtgcttatcgatccggaggggccgcgctgcaccagcggacatatcggctgttcacaatgcttgactgacgattcgatcgccgaacagtactctgcgattgtgggtcgcgcggtcagttttgaggactttgcgcgcgatgccaagggacgcgtgccgcaggccacgcagttggtgaaccggacgtgtttccggttgggatcgctggtggctacggtggcgaacatcgcgatgcccgggcatgtgatgattgccggggagtccgcgtttttggccaagctcggcaccgattcgctgcgtgacggcattcgtttctaccgtcacagccagacccagccggtcaagttcacgattatgaaccacgactggcagctctgggccaaagccgccgccagtcgcgtgattgtgaagcatattgggtaggccgttcttggctcccctcagagaggggagccaagaacgttgcttcgccacagttactccgccacgaccagcaattacggacttgcctatcggcaaggctcaatctcaccttcgctcagctgtcgcttcgctcaggccgtggctactgacagcctactaggctgtcagcttaacgccacagccttgagcaatactgcctgctgggggtggagggacggaggacgaatgccgtagcgctgcagggcttcgccggtcaggactacaccttcctcgttccaccagccgagagtgctctggccgttggtcagaccggtcaaatccaagctcgggtcgagcgggctgacacggtaggtgcgctcggggtcaagtccgggcagatgcacgggcgcggccggataggtctggctggtggtcagctgggtgaagcggtagatggcggcgtcacggttcggcatcaccataccgtccagacgcacggccggatcgttggagtcggcgtgcacacaggtgtcgatggcgaaccagtcgcggtgcttcttgaattcggccacccacacggccagcttggcgagcgcctcgtccggctccttcaacaggttccattcgatgcccatgtggccgaagaacgccatggccatgcgcagttcctggctggtggcgcgctgggtggagtgtgcggggctggcgcccacgtgctcgcccatcatcgccggcggcaccagcagcgaggtgtagcgctggatgtccgcgcgctcaaccgggtccacgcagtcggagacccagatacgatcggcgtgctccaggatgccaagatccacgcggccgccaccagaggagcagctttcgatctcaaggcccggatgtgcggtcttgaggcccttgaagatgttgtagacggcaagggtctgcgcgtgcacggccgggcggccggagcggcgggaaccgggctcggtgacgagcttgttgtggtcccacttgatgtagtcgataccaagctcgccgacaagctggtccatgcagccgtagatgtagtcgaacgcatccggattggtcagatcgagcacctgctgagtgcggccctgcagcggcagtcggccagcggtgggcgagagaatccaatcagggtggttacgggccacatcggaatcggggttgaccatttccggctcgaaccacaagccgaattccatacccttggcgtgcacgtagtcggcgagcgccttcagggacttcgggccatcgggccagacgtcctgcgcaatctgccagtcaccgaggccggaggtgtcgtcgcggcgggaaccgaaccagccgtcgtccaccacgaatcgttccacgccggagtcggcggccttgtcggcgagcgccttcagcgtatcgaagttgtggtcgaagtacacggcttcccatgtgttgaggatcaccggacggccgtgcgagaacaggcgcgggtgcagggagcgcacgtaggagtggaatcgggcggcgatctcgttgagaccatcgccataggagccgaacagccacggggtgtcgtaggagttctggccttcgccagggccagcgagcgtcacttcgccgccgaacaggagttcgccgccgccgattacgccggttgtgtagggcagacgttcggcggacagtacggagttgccgctccagcccacgtgcaccgaataggcgtcgccatgctcgaagctgaaaccgggcacgccggcggtcaggagcagggatgcgtcgaagtcagggcggccggcgagctgcggcttttcgaaacggccgacggtcagcggctggcgctgcggactgcgttcacgtagatggtgaccggtggtggtgaggatttcgccggcggattcgggcagcgggaagccgagctcgatcttgccgatctcgagcggggctccggcgtctgcaccgaacaggttggttacggtggccttctgacggaccaggccgccggggagcagttcaaggtgccattcgacttccacgccctgctcctcatcgcgcgcggtgactatgacgccgggcacgcgggccgggccggtggcgcgggcatggccggccacatcggtgtagctttcgccggacacggcatcgagggtggcttccagcacgccgccggtctcgatgttggtcacggtgaacttggggaagagctcgacgccggcgcggcgcagcaccacgcgttgctcgccgatccagctttcggcctgggtgggcaggatggacggccagacggtgtcgtcgagcgcgccggacacgcgctgcggcttcagggcgtcataggcggccagcagggtgtcgggcttggccagcgggcgaccccagtggacgatgcgcggcaggtcgctgccggcaaacaccagaccgatcgccacattggcggcgggctgggtcaggtagacggcggtgagtgcggtaccgtcagcggcggcaccggtgaaagtcgaggtgttctcggccatattgtctccttcgacgtgtgtggattggcattgcactactggtttcgatggtagaagaaatggaatatgttgccttggtgccgcgtgttggttgcgtgaggtaagtaatgcgtccgtgtctatcgccgctgggcgaagaaatcagtcaggatggactgacactcgccttccaacacgccgccgtgcacttcaggactatggccgatatgcggatcgcgcggaatatcccaaatcgaaccgcatgcaccgagcttgggatcccaggcaccgaacgcgatggtgccgatatgggtctggatgcaggcacccgcgcacatcgggcacggctcaagtgtgacggccagcgtgcaatcggcgagattccaggcgcccaaggcttgggccgcctgacgcatggcgatgatttcggcgtgggcaagcgggtcaccatcagcctcacgcgtgttgtatccgcgcccgacaatctggccggccgcatccagcaccaccgcaccaaccggtacgtcaccagcggctgcagcctgaccggccagttccagtgcgcggcgcatcgcctcgtcatattccataccaacgagtgtatgccttttctcatatcgtctcatgatgtgcataatcggccgcaagcttaacgttttcttcatggttcccatatacttttggtggagaaaaatttaagggagaaggcggcaacatggcggtatttgagctcatcctatgcatcattgcggcggtggtggtgagctcgtttgtcagtcgcttcgtgcccaaagtctccacgccgctggtccagattgtgctgggcgtgctggttacgtatctgccgtttttcccggatgcaacgctcgacccggaactgttcatggtgctgtttatcgcgccattgctgtatttggaagcccacgaaatcgataagtcggcgttgctgaaaacgctggatctgagcctatcgctggctatcggactggctatcgtcacgatggcggcggtcggattcactttgcatgccgtctggccgtccatcaccttagcctcagccttagcactcggcgcggcactcggcccgaccgatgcggtggccgtcagctccctcggtaaagaagcctcgctgacgcagcgtcagcgcagcgtgctgaaaggcgaatcactcttcaatgacgcttccggcatcgtcggcttccagttcgctctggccgccgccttcactggagaattcgccgtggggcaggccgccggcgaattcgtgatctccttctttggcggcaccttatttggcctggtgatagcagcagcggccaactggctattcgagaccgtgcgatccctcggctgggaaaccactaccacacgtattctgatggaactgttcctgcccttcctgctgtatttgggcgcggaggaattcaatgtgtccggcattctgtcggtggtggccgctggcctgttcatccgattcgaccgcaccggcgtggggccgaatgtggcacgcacgaatatcgtttccacttcagtatggggtgtgctgagtttctcgctcaacggtgcggtgttcattcttctgggcatgcagctgccgcgcgccatgagggccagctggtctgacccgtatatcagcaataccgtgctgatcggcattattctgctggtcactctggtggtaatcgcgcttcgattcttctggattgcggccatgctgcgcgttgcgcgagatacaatcaccggccagcgccgcaaaatgacacccgaacgctggcgctcggccgcagtgatgacctttggcggccccaagggaaccatcacgctgtcattgatgtttaccatcccgtattacattgccggcggtgcgccgttcccgatgcgtgacgagctgattttcattgcgtcaggcgtgattatcgtgaccttgctgctggccaacttcctgttaccgctattggccccgaaccgtggcaaggatcccagcgcggaaatgattccggtgaccatcgatgtgttacgcgccacggtggaggaattgaccggacgcatcacgccagagaatcgccgtgcgattctgatggtaatcgaccaatacaccaagcgcatcggacgattgcagcagcgcatcggcgataccgatcctcagggattcgagcaattgcagatcgaagcgctgcattgggaaaaggaattcgtgcgcgaccgacttgccgacaccaaggcgcatccggcggcggatacggccacgcaagagctgaacgtcgaagcctgcgagcgcatgcttgaccagattatgaatacgttgcgtcacacttccactgatccgacttcggggcacgcggtatcgcagattcgcggtcgtgtacgcatgttccagcggcagatgagcaattacgccaaacgcacggtgtccaagattcgccacaccacaccattggtgagcgaggaccagattttcgcgcgcacccgcgaactgcaggtcgaggcgattcatcatgttatcggccggcttattgacgagatgggccaggatacgtacaacaccgagcattgttcggcactgttgctggattatcgtcgtgccgaggcttcattgcaggcacgtccgaccatgagcggcactacggaaaccatcacgcaggtcgaggacgtaaagcgcgagagctacggtatcgaactcggtatgattcaggacatgtacgaagccggcgacatcaaccgagcccaagcccgctccctgaggcgcaacatctacgttatgcaagtggacgctgattccggcatctagtttccctggctcccttctctgaggggagccaagttggggattgctattcccgtgtgactttgagggctacccagatgctgcgaatcagcagaaccgtcagataggttgcgaagagtattccgccggcacgcgggctcatggccccggcaatccaagtgcccagcggtgcggtcagtgccgccacgatgccgataatcagaccggctttggcatgcaccattttgcggcgcacattggccacggtggtggtcatggcattcgggaacatggacaacagcgaagtaccacgcgcgatcaaatcggacgcgccaaacaggatcgacaaagccggcacgcaaatcgcgccgccgcccacacccagcaagccagccaaaataccggcgagcacgccgaaaacaatcatcagcaagacagtaaccagattaaattcgattgacgaatcacgcgaaggtataaaaataagctggctcgcgatgataaacgccataaacaccacgaacgcccagcgcagcacgacttccggcagtcgggacaacagcagcgaaccaatctgaccgccgatgaacatgcccaggaacatcagcagcgcagcaatccaatccacattgccttcaaccgcataggccagaacgccggacaccgaggtgggcacaatcgccaacatcgaagtggcggccgcatgccgctgggtcaggccgagccagaccagcgcgggcacgatgatggtgccgccgccaatgccgaacagtccggacaacagcccgaccagcacgcccaccacaaccataaccgcgatgccgcgcggggactcgtccacatgattctcttcagtatgtgcagtagtgcttgcagtgctcacttcgctcatgggagaacagtctatgaccgagtcagccacaagcgccctcgatgtccgattgctgcgacggccgcgccaattccagtgatggcggctgactacagcacgccagaggtaatgtcgttgtcaagtagccactggcgcaaatcggcgaactcctcaagactcacattgtgatccagaccgtggtagctcttggttttcagccacgtatgctcttccagccaagcggcggtggcgaacagttcgtattttgggattacgccatcgttcttgccgtacgtatagaacacggggatatcataatcggccaggcgagagtcggcgggggccgtgccgggcacctgaccgggtgcgttgaagccggacagggagacgacggcccggtaccgctcgggattgatacgcaacaaatgcacggcgaccagcccaccttgcgaaaacccaagcggcaccacgtcacggtcggcgggaatgttgtcggccacccatcggtcgactgctgtggcggcggcatacgcgtcgtagtcacgatcatcgccgataggcagggcatcgtggaaccacgcgtagttgccggggccgggactgccctcacgggccggcgcgagtgtcagcggcccgcgcaatgccacgaaatcgttatatggagcgatgaggcgcatgatgtccgccatgtcttcttcgctggatccccatccgtgcaggcacaggaacagcggatgcgcggcatgctggtcgaagccgccgcgcgaggtgacgctgtgctccacggtgagtggctcgccaaaacgtccgggcacagtggtggattcgcggccgatcagaggctggctggcattcgcttctttgctcataccattccaatatagaggtcttgcgcgctgtgcggaaaacgatggaccatgatttcaatcacattgggtaatccgcgccgaatcgccttgggacttttcaagggataccggcaatctgtcaggcgttaccgctgtctgcggtatctgcggctgcggtgattgtctcaagttcgccgccccactgctgctgcagtgcggtcatcttgctggcctcgccgaacaccatccagcgtttgccgttcagcaatcgccaatcacctttcgtttgctcattatcagcgtattggctcagcagttcggaaatcttgctttcgataggtgcccggctgatggctgcggacgattccgattcaaaggatacgaaggccactctcggatcagtgcacatctgtacggtggtgatgcccggcaaaccgcccgtatcaagcccctgccatccttctttgcacgcgccggcagcttgttcgatgccttgctccatctgtgcggtatcttcgacgggtgccttgtcgttcgactgctgaatcagtccttccgggaacaatacgcccacggccacgccgataaccaagcaaactatggcgcacaccagtgcgatgatgccgcccgcgcccactcccccgtgagtggcgtaccgaggcatggtgactcgcgcagcgatgaccagaatcagggtgatgccgataagcaccgccgccatcaacgcaatgtatcgtcctggcactgccgtcataaaggaaatggcgtaaggcgcgatctcatgaaccgccgaggtggccgataccacgacggctagcagtccgctgacaacggcaagtctgcggcacaatatcgacgttgggctgctggcttttgtagcggcgaatcgccggccggcatcccgcctggatgggcgtcgattctgtgcacgacgtgagctgcgcgaatcgtcatactgaccatcgccgaagaaatcgtagtcctcatcgttgcgggccatcggtgccccccttcctgccgattacacagctagtgtaccgctatggcttgggaatggcggtcattcgggggaatgattcagggcacaaaaagaaccccggcggttgcccgccggggagagaaaggagagagaagaagaaagggggttcaattgtcgggaactgctgcggctcctgatcagctttccgctgacatcttttatataaccactgctttctgggtctacctctaagtttctctgagaaaaacctgagaatacttgcgattgatggaccgcggaagcgtgaggagcctctcacgtttccgcccaaggcgctagacttgaaggcagtatttatttgcccaaggagtttttcacatgctgctgtccgaccgcgacattctcgccgcacagtccgcaggtcatatctcacttgatccgtggacccccgaaatggtgcagcccgcttccatcgacgtgcgattggatcggtacttccgtttgttcaataaccacgcctacacctatgtcgatccggcggaaaaccaaggcgcgctcaccgaacagttcgaggtggctcccgacgaaccgtggattttgcaccccggcgagttcgcactgggttccacgtgggaatacgtcaagttggacccgtccattgccgcccgtctggaaggcaagagctcactgggccgattggggattctcacccattcgactgcgggcttcattgaccccggtttcgaggggcatattacgcttgagctgtctaatgtgtcgacgctgccggtcaaactatggcctggcatgaaaatcggccagatgtgcttcttccagctgagctcgcccgctgagcacccttatggctccaagggcaccggctcgcattatcagggccagcggggtccgacgccgagccgttcctacgagaatttctaccgcgcgcacatcgacgactgagcgttgcgacgtaccattcggccggcggatgccggccatttgcttaatcccaaggagatgtcatgaccaacagcgatggcgggttccagttcgacttccagcagcacgaaaagccggtcaggccaacggttcctccgattcccgggcaagagacggcagcatatagcacggaacccacggcacaagccacaccggctctgcagttcccgcagtctgtgcagtctgcgcagcccacacagcccacacaatttgtgcagcccgcgcaagtagcgtatgcctcacaacccacgcaagctgtgccgaccgtacaagccgctcagccgacgcagcccatcgatccggccatgacgcaaccgttctcgccgcaattcccggctgcggttgccgcacaagcaccacagccggcggcagccacgcagccagtagtatccgaaacaccaatcgccgctgcgcccggccagcagcaatacgtttgggatcagacgacgcaaagcttccgcccggtggaaccgacagcgccagtgacgccagcagcaccagccgcaccagcggcaccggcgacatcgcctgtttcggtagcttcaaacgccgcgacacaggcgttccaacccaatcaggccgagcagcctgcggtagatgccgaggcaacacaagcgttccagcctgatcaggtcatggcaacacagcctttcgaagctcaggccatgccgaatgccgaaaccgcggccacacaggcatacggcgcatcatccaccgtatccggtgagaccgttgccatgccggcaacgcaagtagcgtctgccgatgatgctgcagccacacaggtgttccaaccggccgccctggccgcttcggcacaggctcagcctgctgtgatgcctccctccattccgttggatcaggtctccgatgaggacgattccgatggcgccgagcctcgtcacggcggtagcggcaaaaagaacacccgcaagatcgtcagcattgccgtagcagtagtcgccgtgatagcgctggttgtcgccggcctgctctggtggcattccaacagcagcaaggcgagccaagccgtggcattggccgagtgcaaggtagcggccaagcagtacacgaatgctcagaagaagctcaccaccgccatatccaatggccaaaccagcgcgcaaacatccaccagcgatgtggccgatgccaatacgctcaccacgctgaatcaggcgttgcaagacgccggcaatccggctgacaccgccaagtgcgattccaacctcaacgccactgagttgaagtctcacactaaagagctgcagaatgatgccagcgacatggctgacaagacggatgccatcaacaacgcgatcaaggccgttaatacttcaaaggcgacggccgataccaacacactgaaatcgaacctgagctcggctatttcgcaggcgcagggcacgctggataattccgcgggcagtgtggccgatgaaaacacccgcaccgcgctgcaaaacgccatcaccgaggccaatacggtgatgaacgggaccagtccgtccgaatccgacgtcaataatgcgatttctaaactgcagaaggccgagtccgacgtcaccgcctcgatgcaggccaagcagcaggcagatgccgccaagcaagctcaggaagaggctcagcagaaggctgaccaagaggcacagcagaagtctcaagacgagtccaacaatagcgacaacaataacggcggcgacaactccacctctactgacggcactgacggcagcaacaactgaggtctgcagcgttctcctgtttcccatggggcggttagcatattttcctttttcgcggaataatgccgttttcagcgaccgccccatgggatagttaccgccccatgaggagccgtttggatatagcagtgggccgggctctgaataccagagcccggcccactgctatatgcccacaatcagggctattgcgatggcttaacgcttggccatcgcgcgtagcacaatcttgcgcagttcggaggcaatcagcacgattgcggccaagcagatgcattccacccaagccatcgggctcaatgccacggtgccgaacggaccgttgaggaacggcacgtaaatcaccacgagctgcagcgccacggacaaaccaatcgcaccccatagccacttgttggagaacagacccacgaatgcggactgcagatgcgaacgggaggacagcgcgttgaatagctgggcaaacaccagaatcgtgaagcccatcgtacgggcctcggtcatctgcgcttcatggccgatggcatccaccgagcggtcggtgaacaagccgccggacaggtgcatgtccataccaatcagcgtgacgatggccatgatgacgccgatgtagatgatgtcgccccacatggaggcgtcaatcacgcggtccgtcaccttacgcggtttacgacccatcacatcgtcggtctgcgggtccacgcccatagccaacgccggcgcggcatcggtcagcaggttgatccacagcaactgtgtggcgagcagcggcacggtgacacctacggtttccggctggcggatgccgaggaagccggcaaacaccacaccgaggaacacggtgaacacctcacccacattggaactcagcaggtagcgcaggaacttgcggatgttgtcgaagatcacgcgaccctcgcgtacggcggccacgatggtggagaagttgtcgtccgccagaatcatcttggcgctctgcttggtcacttcggtgccggtgatgcccatggccacgccgatgtccgcggacttgactgccggggcatcgttcacaccgtcgccggtcatggccacgatgttgccttggcgctgcaaggattcgacgatcttgagcttgtgctcgggggccacgcgcgcgtacacggacacttcggacgtggccttgtcgagcgcggcctcatcgggcagctggtcgagctggtcgccggtcagggccttgccatccttggcgatgatgccaaggtcggaggcgatgcgggcggcggtcagcgggtggtcgccggtgatcatcaccgtgcggatgccggcacgatgggcctcggtcacggagtcgcgcacctcagtacgcggcggatcgataatgccgaccatgccattccagatgagatcggtttcaatggcttcggcctgatcggcgatgtcggacacctggcctgcagcgttgacgcttacaccgggcacatcagccaaagaaccggtttccagcggacggcaggcctcgccaagcgtacggtaggcctcggaggagagacgttcgacggtggcgagaatcgactggcgatcgccttcggtgagcttacggacctgaccacccacgcggatgcgcgtgcagtagctcaacagcacgtcgggcgcgcccttggcgaacacggtgagcttgtctgaatcggtgctgtccttggcgatgatggacatgcgcttgcgttcggaggtgaacggaatctcgccaacgcgcgtgtatcgcttgatcttgcgatcggccttgaccttgcgtgcggccacgatcagcgagacttcggtggggtcgcccacaatctcccaacggccgttctcctcgcgtagttcgccgtcgttcgcgagcgtgccggccacgagcgtggcgacgacttcatcggccacaatctgggcctgctcggattcaggactgacgccgccggtcataaccatgcggccttccggcgcgtaaccggtgccagtgatctgcacttcgccggacggggtgaccacacgttccacggtcatctcgttgcgggtcagcgtaccggtcttatccgagcagatcacggaagcggagcccaaggtctccaccgaatgcagtttcttgacgatggcgttgtgcgcggccatacgctgcacaccaagcgccagcaccacggtcaggatggcggccaagccttccggcacggcggccacagccagcgagacagccaacagcaaggaatcaatcacgtcatggacgtcgttgaagccttccagcacggcgagcgccaccagcaccacgacagcgatgacgcacaccgcaatgccgaggatcttggagacgtaatccatctccttctgcagcggagttttctcatcttcggtggcggagagcatgtcggcgatcttgccgacctgcgtattcataccggtgccggtcacgattgcgcggccggtgccttgcgtcacggaagtgccgttgaagatcatgttggcgcggtcgcccagcgccttggcttcggtgagtgtgtccggcttcttgccaaccggcacggattcgccggtcagtgaagcctcggcgatgcgcaggctggccgcgttgaccagtcggccatcagcggagaccgaatcgccttccgcaaggacgatgatgtcgccggggaccacgtcggcggtgttgatgcgcatgaccttgccatcgcgcagcaccgaggtttgcggggccgtcatttgtgcgagcgcttcgacggccgcctcggccttggcttcttgcatatagccgagcacagcattgacaatcaggatcaagatgatcacgatggcgtcgaacggcagcacttcgccgccttccgcgccgggctgcgcattggctttttcgatgaaccaagcgatcaccgagataatagtggccgcgatcagcaggtagaccagcggatcttggaattgggccaggaatttcttccatttcggtacgggcggggcgctggcgagctcgttcgggccgaatttggccagtcggcgcttggcttcttcctcgctcaggccgtgggatgggtcgacgttcagggctttggccacgtcgtcggcgctggtcagacttggatcggtatcccccaatagcgcttcctgtgcgcgcacctcttccgattccacgaccccgttcgttgcggtcgtggacactgcggattgatctttgagatcatccataatgttctccttggtattgccgcggagtagtcagccttgcggccgctgccgggttttctctcccggctggacgcacaggactgcgcggttatggacaccggcgcaactgctgccgatgcatacgattgccattattccataaccgcgtggcgcacttggcgcacagcgtaatagcgttttgcctagaacaggcgacgcaaccaggcctcagccaaatcaggccaacactgcacgcattcgacgatgtgcgcatagaagccgttaccggcagtttccgcattggccaaggacaggccgtggctgccttcagggaacaggtgcgcctcaatgctcacgccggcggcccggcaggcctggatgagcattagcgtgttctccacgggcacggcgtcgtcggtcatggtatgccagacgaagacgggtggcgttttggcatcgatgtgcttttcgatggagaacttgtccagcaaagcctgattgtgagcttggtcccctagcaggcattggaagctgccgcgatgggcgtacttgccggcggtgattactgggtacgagagcatcagcgcgttcgggcgcacggcgtccgggtctatgccgccctgttcgcggatgtcttcgtcgccgaccgaggtggcgaggttggcggccagatgcccgcctgcggaaaagccgagtacggccacttgcgcggggtttacatgccactgatccgcattggcgcgaatcaggcgcattgcctcggcagcctccagcaaagccaccggatagcggctgggctgcaccgaatagcgcagcacgaatacggcgaagcctttggccaggaattgcagggccactggctcggcttcgcggtcagaagtcatggcgtagccgccgccaggcaaaatcaggatggccgggcgtatacggtccggttccatctcctcgctgttgtcggccacatagccaaagaatcgcgcctcgctgccatcaatgccaacgatggtttgttgaatgtattgcatgccatacatcatacgcgcagagaatagttctcgataagaaccactcgccatatgcggtcttgcccgtatctccaaaccgaataacacttacagcgaatcgtgaagactgcgggccatggcgcggtcgcgcgagcctttggtgagcttgagaccgagggtcacggcaatcaacacaacagtgcaggcgatccacagcgttcgaccgccgaagttgctgatagtccagccaccaatcagcggcgccagcgcaaccgacaccgaccacactacgttgtagacgccctgatacgtgccacgcgccgacgcgggtgccatggcggcaaccgtagtggtggcgatagggaatgtgcccagctcacccagcgtccacagcactacggcaagcgcgaatccgccccaagaatgggccgcggcctgcaccgcatagccgatgacggttacggcgaggcccatcaccagcacgcgtgaattgcccatgcgcgcgaacagtttcatcgcgggaatctgtagcaggcacaacataccgccattgatggtgagcagcaccgaatactcgcccagccctagaccaaggtccgtcatggcaatgggcaggccggaggtgctttggaagtacacaaggaagtagccgaacatcagcagggagaagccgaggaatggagtatcggtgagcacgcgccgccaattgcgagacatggcgcccttgacactggcagccggtgcggcatccgagtgattcggcctctcaatgccggcgaattccgcatgggtaacactgcattcgtcttcatggcgcaccgcacttggcaccgatacagtaatccccaaatgccgcacctcgcggaagaacgcaatcagcaatatcgtgacggctatcatcaccgccgcttcaacgtagaacatcagcgaatacgagatcttgaccagctggttggccacaatcggtccaatcgcgtacccaaaattaatcgcccacgattgcagtacgtatgcacgttgctgacgttcggcaggcaccacatccgcgatatacgcggcgatggccgggctgggcagcgaggcgaacgcaccatagacgaacagagccgcgcctaaagacacaggatcagtgagtacggaaacgatcagcagggcagccgctgcgccgatttcgccgatgataatcatggattggcggccgaatctgtcggacaaggtaccgccgaacaggcagccgatgattgcgccgaagccgtacatggccacgactgtgcccaccacaccctcatcgaggcgcagcgcggaaaccaaatatatcgacaagaatgaggtcacgaagcgacccatccacagaatcagaatcgccaaccataatccccaatacagcagggacagtccgaatatcatacgctgcttcttcactctcaataccttaccggctaccgacggcggaatagccgcgttttggcgcggggtgctgggacaatagcacctatggctatcaaaaaaggaccgaccaaggggtcgggtggcaagcatcgcaacaaactgaagggctacggccccactcccaaggccgaggaccgcgtctatcacaaggcgtacaaggccaagaaagcggccgaacgtcggcagatggccgacccgcgtctggcagcccgccgtcgagtggacaagttcgcttcggcggatacttcggatctggtgtacggccgtaattccgtgctggaagcactgcgcgtaggcgtaccttcttccacgctgtacatcatgtctcgtattgaacatgacgatcgtactcgcgaaatcgtgaaaatcgctggtatgaacggcctgcacatgctggaggccgatcgtctggagatggatcgtatcgcccgctctggcaaccatcagggcgtgattctgaaggtcgatccgttccagtactcctcgctgaacgagctggccgatcgtgctgagaagaaggccaaggcaatggaggccgcgaattcggcggccgcccgtattgctgcgcgaccgctgtttatcgcattggacggcgtgaccgatccgcagaacctgggtgccgtgattcgttcggcggccgcattcggtgccaatggtgtgattctgccggaacgccgttccgcttcagtgaacgccgccgcttggaaggtgtctgccggtgcggccgcgcatatgccggtggcgcgcgtggtgaacctgactaaggcacttgagggcttgaaggagcgtggatactacgttgtcggccttgacggtggcggcgataagctcgtcggcgagactggctttgaatccgatccgctcgttgtagtgctcggttcggaaggcagcggtttgggccgactggtgcgcgaaacctgcgacgcgattgccggcatcccgatcagctcgtctgttgagtcgctgaacgcttcagtggcggcgggtatcagcctgtacgcggtgtccaacgcacggcgcaaggctgcggcggagtgattgtcgcttgaggccgtaataggttgtacatacacggaagcccctctatttgaggggcttctttgtgtgatgggctcacctacagacagtccaccggattgtccgcttaatgactccacactgccgcatccggatcgtcatcggggttgtagccgtcgtcgtccgggtcgctgtaggtggattcgtcgtcaatgacgccggaatcggcctcttcgttaagttcggcgagtgccttggagtcaaggctgtagctcggcagagcgttgtcgatgtagctggtcacggcctcgcccatcggcacgtcgtggccggccttctccgccaggaaccagcgatggtcaagcacctcatggaagaactgagcaggctcgatctgggagcgatattcgcgcggaatcatacgcacggtcggctcgaacacctcacgcatccagtcggtggccacgatttccagatcctcgccctcacgccacgtggaggcacggtaggcgtcaaggtcgttgagcagacgacgggcctggttctcctgcacgtcaaggccggtgaggcgcagcagcttgcggttggcgtagccggcgtccaccacgcgcgggcggaccagcacacgcttgccgtcctcggcggtcttcatttccagctcgtccacgtcgaagcccagctcgttgagcttgttgacgcgctgctcgatcttccacatttcgtccgggttgaacttgtcggtgtcggtcagggcgctccacagcgagtggtagcggtcgactaggcggttgcccacctcgatctcatccacgtcgccgggcagtagcttgccggacgccaaatccataagttcgccgatgatgttggtgcgggccaagtcgatatcgtattcgcgctggccgtcggtgagctgggcttgcaggtcaccggtctcggcgtccaccaggaaggcggagaaagcgtcggcgtcgcgcaggaacaggacgttcgacagggacacatcgccccagtagaagccggccaggtgcaggcgcaccagcagcacggcgagggcgtcaatcagtcgttcggcggtgtccgggcgcaggttgcgggcgaacaacgcacggtacggcagcgagaacttcaagtgccgggtgaccagaatcgcctccagcggctccccttcacgggtatgacggccgatgaccacggcgatcggggtcacagttggcagttcgagcttctgcagtcgacgcaggatctcgtactctcgctcggccacctggcgcgtgatctccttcatggcgtacacctcgtcgcccacgtgcacgaatcgcacgacgtggcgggagatgcctcgcggcaggttggccagcaggtccttaggccaggtggccaagggcttgtgccagggcagcgtgaacatctttgggttcgagctggcggcggtgatcttcagtgcttgcggttccgctgaatcggcgtgttcgtcttcagctttgacagacgtggccttcagcgcacgcggatccatctggggcaattcgttcaactccatgtgttcgattttacgtgtcgttcgcgatgtgtgctcctttgccacgacttcggcgcgttatgtttacgggaaaaacaccgtttggtctctccctcagaccgtctaaaaggcaaaagaaaagccccgcagctatgcagggcttttccaacgaggccataagagaggaagagaataaccccgtttaatggttgacgaagctattagacctcgccaagtatctactagttcagacgcagctcagtcgacggagcgaacaggtgcatcttggccgggtcaatcttgatcttgacggtcgcgccaaccttcggcagcgcacgcggattcacacgaatcgtggtgagcttgttctggtcggacatgacctgggaagcctcagcggcggagccatcggtgatgatgttgccgtagatgtagccatcggagcccagatcctcgacgttcacaaccttcagggagaaggcgttcgggtcgtcagccggggccaggccagcgtcctcaggacggaagccgaccacgatctggccgttgtcttcggcggtgagcttgttgacggcctcagccggcaggtccacggtgtcctcaccgatcttcgccttgccgttgaccaccgggtgggtgttcaagttcatcgacggggagccgatgaagccggcgacgaagacgttggccggacgatcgtacagctcagtcggagcgccgacctgctgcaggataccgagcttgatgacggcgatgcgatcgcccatcgtcagagcctcggtctgatcgtgggtcacgtacagggtggtgacacccagctggcgctgcagggcagcaatctgggtacgggtctggacacggagcttggcgtccaagttggacagcggctcatccatgaggaagaccttcggctcacggacgattgcacggcccatggccacacgctgacgctgaccaccggacagagccttcggcttgcggtcgaggtactcggtcaggtcgaggatctcagcggccttctcgacgcgcttgcggatctcgtccttcggagtgccggcgatcttcagggcgaagcccatgttgtcggcaacggtcatgtgcgggtacagagcgtagttctggaacaccattgcgatgtcgcggtccttcggctgcatcgtggtgacatccttgccaccgatgaggatgcggcccttgttgacctcttccaggccggcgagcatacgaagggtcgtagacttaccacagccagaagggccgacgaggacgaggaactcgccatccttgatatcaagattcagatcatccacggagggcttatcgttgcccgggtagatacgagtgacgtggtcgaaaacgacttctgccataattactaatcctttcagaggcaggtacgtgcctcacgatccgttgtaaagggatttgttctttactgcgcttccgccctcgccaccgacgtacaactttgctttcggaaactgcaagcttcagcgtttactttttttccggttcagtgaaggttctcttcgttgagccgagaactactatacacggaccgtggaccaaggcaagtggcgtgtctgaaaatgtagttaactttatgggcgtttctgggggtgttgtgtggttcggcccatgacacgcctgtttctcgaacgtgcgaaccggcacgcccggcgtagagcaggcctgctcttcccgaactgacggattccatcagtcgccgactaatgcaacacagactcgaaggtgacgccgttgcgggcggctttgcgctcggccttgcgctcctcggcgttttcgatgcgctggatgcgcagctggcgccagtcctcgcgcatgtcgcggaaacggtcggccagcgttgcgtcatcgttctcggcatcgccatcagtaccgctgccatcggccttaccgaacgtgccatcggccaccttggtgatgcccagcttgagcagtccgagcaactcacgcaacgtttccggtacgggctcatcgccctcatcggcggacttggtcaggccctcgatgcgacgacgaagcgcgtcggcgtcctcgggatcgatcttgagcccggcgatcagcgactggcgcatggtctcgtaatcgaggttggcaaagaaattcagctgttgcagcgtcatgaagcccttgagctcggggaatcggtggacgatgtattcctcgcggtcgtcggcggcgcgggtccagtcgcgggtgagctgcggatcccagttggcggtaatcgatccctcgcgcatgcggtagtggtacagcgccttgggcagacggaccacgcgcgtggcctcgccgatcacgttgcagatacgggagagatcctcgattttgcgccccaccgggaaggagaatccggtgccctgataggtggaggcgggtgccaggaaggcccagaaatagccgtcaatctcagccttgacttgctttttgatgacctcgaccggggtcaggacctgcacctcggtgaagtcgttgtggcgatagttggacagcagcggcttgttgttctcggagatggtgtcgaactggaacatcacgaggtcggcgtcatactcgcgcatggcgttcaggcagtcctccaccaacgtgggtgccacggtgtcgtcggaatcggcgaagtatatgtacgcgccgatagcctcagcgataccggagttgcgggcgtcggacaggccgccgttgggcttgtgaatcacgcgtatgcgcgggtcgcgggcggcccaggcgtcgcacatggccgggcaattgtcgggcgagccgtcgtcgaccagcagaatctccagattggcgtacgtctgcgcagcaacggacgccacgcattcgtcgaggaatttctcgaccttatataccgggatgatgatgctgaccaacggctcctgttccatatctccagcgtagcgccgccgtgcgaacgcggcggcgctgcgggttcgcggaccgcgaaacccttagaagtcccagtcgtcgtcatcggtttcttcggctttgcccatcacgtaggaggagccggagccggagaagaagtcgtggttttcgtcggcgttcgggctcagggcggccaggatcgcggggttcacatcgcaaatctcagccgggaacaaagccgggtagccgaggttcatcagcgccttgttaccgttgtaccgcaggaacttctcgacgtcatcggtcaggcccacgcggtcgtacagcgactgggtgtactccacttcgttgtcgtacagctcgttgagcaggtcgtacgtgtagtcctgcagatccagacgctcggcatcgctcagctgggcgatgcccttctggtacttgtagccgatgtagtagccgtggacggcctcatcgcggatgatcagacgaatcacgtcggcggtgttcgtcagcttggcgtgcgcggaaaagtacatcggcagatagaagccggagtagaagaggaaggactcgagcagggtggaggccaccttgcgcttgtacgggttgtcgccctcgtaatagtcgagcacgatctccgccttcttctgcaggaactcattgttctcgctccagtcgaatgcggcatcgatctgctcggtggagcacagggtggagaagatggacgagtagcttttggcgtgcacggattccatgaaggcgatgttggtgtacacggcctcctcgtgcggggtgagcgcgtccggaatcagggagacggcgccgaccgtgccctggatggtgtcaagcagggtcaggccggtgaagacgcgcatggtgagcgtgtgctcgtcctcggtcatcttctgccagctggggatgtcgttggagacgggaactttttcgggcagccagaagttgccggtcaggcggtcccagacctcaaggtctttctcgtcttcgaggcggttccagttgattgcggagacgcggtcgatgagtttcagcggtttgcgcggaatggagataggtgccatggggattcctttgcattactcgtcttgggagttgtcggcgggcttgttttcgaactcctccggcgcggtcagccggagcagtgctctatagatggttcgtgacattgtgggttccttagaggtggcctctggttgttcgatgtgtgcggagaccgccgtctgaggccgaaggcgtacgaaggtacgtcgagtgccgaagaaaggcggtatacgctccatcgaacgatcagagcatgcaggagacgcagccttggacctcagtgccttccagggcttgctggcggatgcggatgtagtagagggttttgatgcccttgcgccaggcgtagatctgagccttgttgaggtcgcgggtggtggcggtgtccgggaagaacagcgtcagcgacagtccctgatccacgtgctgggtggcctcggcgtacgtgtcgacgatggccttccagccaatctcgtaggcgtccttatagtactcaaggttgtcgttggtcatgtaggcggccgggtagtacacgcgcccgatcttgccttccttgcgaatctcgatcttggaggcgatcgggtgaatcgagctcgtggaatggttgatgtatgagatcgagccggtgggcggcacggcctgcaggttctggttgtaaatgccatccttcagaatcgcgtcgcgcagggcctcccaatcggccgcagtcggaatcgcgatgccgtactgctcgaacagcgcacggacccgttcggtgcgcggggtgagcgaacgacgaccatcggtgtacttgtcgaagtagttgccctggccggccgggtgggcgtagtcgctcgtagcgaagctggcgaacgcgcggccatgctccacggcgagcgcgtgcgaggcgcggtaggcgtggtaggcgaccgtcatgaagtacatgtcggtgaagtcgaggccttcttcggagccgtagtggatgccttcgcgggccaggaagccgtgcaggttcatctggccgaggccgatggcgtggccctcctcattggcgcggcgaatcgaaggcaccgcgttgatgctggtgtgctcggccaccgaggtgagtgcgcggatcgccgtctccaccgtgtgagccaagccgccatccatcgccttggcgatgttgagcgaacccagattgcaggagatgtcgcggccgacatgcgcatacgtgaggtcctcgttgtatgcgctcggctcctgaacctgcaggatttccgagcacaggttggacatggtcacgcggccttcgatcgggttcgcgcggttgaccgtgtcctcgaacacgatgtacgggtagccggattcgaactgcagttcggcgatggtggtgaagaacttacgggcgtcgatgtaggtcttcttgatgcggtcgtcggccaccatctcgtcataatgctcggtaacggagatgtcggcgaacggcttgccgtacacgcgctccacgtcgtacgggctgaacagggccatctgggccttctgcttggccagttcgaacgtgatgtccggaatcaccacgccaagagccagcgacttgatgcggatcttctcgtccgcgttctctcgcttggtgtccaggaagcgcaggatgtccgggtggtgggcgttgaggtacaccgcgcccgcgccctgacgcgcgccgagctggttggcgtaggagaaggaatcctccagcagcttcataatcggaatcacgccactggactggttttcgatgtgcttgatcggagcgccgagctcgcgcaggttgctcagcagcagagccacgccaccgccgcgcttggagagctggagggccgcgttgatgccgcgcgaaatcgactccatgttgtcttcgatgcgcaccaggaagcagctgaccggttcgccacgctgggccttgccgaggttcaggaaggtcggggtggcgggctggaagcggccggcaagcatttcgtcggcgtattcgatggcctgctgctcattgccggcggcgagctccagggccacagcggcgcaacgctgcgggaagtcctcaagatagaggcgaccatcgaacgtcttgagcgcgtaggacgtgtagaacttgaacgcaccaaggaaagtgccgaactcaaagccggcggattccacgtgctcgtagatgtggtcgaggaattcagcggagtactggttgaagaccgcagggttgtagtactggttgctgatcaggtattcgagacgctcggcggtggaggcgaaccgcttgctgttggtggccacgtgccctgtcacgtattcgcgttcggcggccttgtctttgtcgaactggatcttgccgtcggcgtcatagaggttgagcatcgcgttgagcgcgtggtaatcgtgcgccgggtcgtactgttccgctgcggtgtcggcagtattgtcgagcggcaggccggtggcggtgaggtcagtcattggaaatccttggaatatggcagaagtgtgtttactcagacagttgctccccccagtcaacttcgttgacagctcccctcggagaggggagccaatacctcgagggggtcaagatttactgttcggtgaagaagcggacgaggccgtttcgcacggcggcagtgtcttccggggtgcccatgagttcgtaacggtagaggtagggcaccttgcatttggcggcgatgatgtctccggcggcacagtaggcctcaccgaaattggtgttgcctgaggcgatgacgccgcgaatccactcgcggttggctggatcgttgaggaagcgtttgacctgaatcggcactgctttcttgaccacgccgccgccataggtgggcaccatgatgacgtacggttcgcggacgtttagcgccgggtcggcggcccgcaacgggatgcggtagacgttgatgccttcgtcctgcaaacggcatccggccacgaaccgtgcggtgttttcggaggccgacgagaagtagaccaatgcgccgatcgtcttgccttcggccgcgaattcgggctggctcagactcacgcggacaccgtggcggcggcgcggttgtcggcggccacctgctgggcgacttcgcgaatcaggtcggggcggtagccggtccaggagttgtccggcgtgatgaccaccggagcctgctggaaaccggcggcctgcagctgctcaagggtggaggggttctgcgtcaggtccacggtttcaaacggcacacccagcttggtgagctggcgcttggtggcatcgcactgcgggcaatgcggcttggtgaacacggtgacggtcatggcgactccccttgatgtggttctgatgaacagtgaagcgaaggccatattacagcggtgtgatttgaaatcaaggcactatatgtagtggcgcgtgtcacataacaaacctagatatagggtttttcgttgatattccgccattcccatgcacccccgaaaatcggcgtgcagcgacccgcccaatcacatgtggcattgttcacatttgcgtttgaaccgctcttcgactgatcctcaaccgccctgcaaccgccatcttgagtttcgaggggctgttttgaccctttccggagatctatctccgtttcgaggggctggtactcaagtaagcgcatccccaaaatggcggaatgacggtggggcgaagccgtttatacccgtgttctagcgggccaccagcccctcgaaacgggagtaaacctctacggaaggccaaatcagcccctcgaagcggagaacggatacctcggcaccccgtgtggagccagaaggcccggccggatgtccaaacgagcatccggccgggccttaaaagtagttgttcagttatcagaatcgatgcggcgcgatactactccgcgtctttacggctccaacagatcttcgatgcggcagccaagcgtgcgggccaaagcgagcacggtggagacggcagctttgccaaggtctttgcggcgctgctcgtacatttggatggagcgcagggtaacgccggagcggcgggccagcccggattggctgagtccggcgcgcacgcggatcgtgtgcagccgggagtcgccctcggtgcgattatgggcggcccgctcgtcgtacacgtcgacgaatcggctttcgtcggcttcgtgcagagtcgggtgcagtcgcacgatatcgtcgagcgacagcacatcgagaatgtccgagaaccgcactcccctggcccattggcagtatgcgagtacccatccggcccagtattcgggtgttgagccggcgcgcagtgcggctggcggcatatcgagaatgcgcgcccaaccggtttgccgcatgatttcggccaccagctcctcgccggacatgccacacacgtatttgggcgtgcctcgcccgaaaagcgcggccgcctcggaggtggcgaagaagtccatgaataggccgaccggcaacccgcaatcgttcagcgcataatcgaaggcgccggccaagttggccatggcgtccggcaagtatgtctcatcataggcggggatcatcgttggtcactttctcgcggatgatgtcgcgcatgaacaggccgtcgagatcggcttctgcacttttgcggcggtaggcttcgcgagctgtgcggtcgcgctcgttacgcaatccgtggtaggtcgaagcgcgggcgatttcgcagccttggaaccgcagtgccgcgaatgcctgaggactggcgagtacgatctgcttgccgagctcgcccaaccgcatcgcctcagcgagttggtcgatggaaatcgcgttattgacaaaagcgcgggcgaacgagaaatacgaatcgtcggcacgatatccgacgatgacgtcagcctgactggcatccggcagaaacacttgtttcagatattcgatgccttgcgcggcgacggcggtggtcggctggaaacgacggttttcgaccagcatggccagccagttcaggatggtgtagggcggctgggacaggtccaggaagaggagcccgtccgtggtcaacgtgtaccgattcgcgaaaccgtcatccagtcccgcgcacgcccattccttggccagctcgacgctgcgcgtgcaatagaatccgcggccataatcgttgttcggcttgaccagcccgtattcaggatgcttgatgacatgcgaagagccatgccacagttcgatcgatgcggtctccattggccggctccttctctctctccttacatattcttgattatatcactgtggtgatagtcataagggaaatacgagatgaaaaataccgctgtatacgttcgcacacaacgtgaaatgtatacgaacgtatacaacactgatgtccggagtcatgctccgcagtggcgcagcggacgcgccactacaatcggaatatgggactgaagacgtggaagaagtggacggactggccgctgatggtgctgtccgtggtgtttctggtggtgtattcgtgggaaattctctcccgcacgcatatcgcgctgtgtgaaaccgtcatcaacgtgatctgggtggtgttcgtcgtcgattatgtggtctcgctgtggttggccgacgatcgctggcggtggttcaagcacaacctgttcacgctgctgaccatcgcgctgccgatgctccggcccttgcgactgttgcgtttgctgaccgtgctgcacgtgctgaaccgcacctccggcatggcggtgcgcgggcgcatcaccgtatacgcggtcggcgcggtgggaatgctcatgtacgtgggcgcgctggccgtgtattccgtggagcgcgaggcgtccggatccacgatcaccgacttcggcacggcgttgtggtgggcgttcgtgaccgtgaccaccgtgggatatggcgacttctcgccggtcaccttccaaggcaagatcattgcggtggtgctgatgttcaccggcatcgcgttgatcggtattgtgacggccacgctggcctcgtggatcgtggatcaggtcaatctggagacggatcggcgcgaggacgctcgggagaaggaagtggccaaggaagccgcgcaagaggctattgcaacatcagccaatcccgaaatcgacctattgcgcgaggaagtgcgtgagctgaccgctacggtagccggtctgcgcaccgaacttgagcgacgttgattggcgaagcgggacaaacaacgattctgccaagaaggtccgcgtcagttgttgtcaccgcggattgcggcagaatcattgtcgccacggctgttttcttcagtcggctcaacccaacttttgataatttttatttttttgatatttttgataatttttattttaggttgattcagcgaggaggcggtccacatgaaggcaaaggaaaacccattcaagccaacggcaggaggggaaccgcccctgctcatcggccgaggcaaagttatccgcgatttcgagaaaggtctcgataacggagtcggtgccccagggcgcattatgctcgtcaccggcgctcgtggaaccggaaaaaccgtgatgctcactgtgttcggagaccgggccaaagcgcgcagatgggatgtcatcgaagaaacggcctctgccggactatgcgaacgccttgttgatgccttacgaaccgggcgaggggcccttgaccacctcactatccgaccatcgttgacttttgctggagcgggcatcggcctcggagaagccgaactatccccgaagcgtatgcccgaaacgttgagaagtgccattgccggacggttggatgcgcttgagaagcgccatgctgggttgcttatcaccattgatgagactcaagcggctgagcgatccgacatgattgccatcgccactgccatacagcatcaaatcagggaacgacgcaatatcgccatcgtgttcgccggtctcccacagatgatttctgatttgttcaatgacgaagtcatcacgttcctacgtcgcgcgaaaacgaacatactcacagatattcctcttgatgaagtgcgcgatgctttcgccacaacattccgcgcctccggcatgtccatcaccgacgctcaattaagcactgcagccaatgtgacagccggatacccctatatgattcaactggttggctaccatatctgggatgccgcagacatgcgggactcggataccatcatcgacgctgatgttacggcaggtatcgaggaagcacgtattgaccttgataacgccgtgtgcatcccggagttgcaaggcttatccaaaaacgaccgtgagtatctcgaagccatggcagcgtcagatggtccctctcccaccgtgaatgttgcacagcgcatgggcaaaacgcctaactatgccgccacctaccgcaaacgcctccttgacgccttcgttatccgcgaaacagaacgaggcgaagtcgattttgccgtgcccttcctgcgcgaatacttgcgtcggaatcagtaatcggcacaatgcacagtatcgatatattccgttccatataatgacttttcgcattcagatacacaatggacggcctgttgagtagcactcagcaggccgtccattctatttagctattcagttatcggagacacacctcaggccttgaccggagcgccagcgacctgctgggaggccatcacgccgaacaggtagccgtcttcggagaagtattcgaaggtacgaccggcgaagtcgcggcattcgaatctgatatcgttatcgattcgatcagcggctcacgatactgcccttgcatcgctgtgccactgttgaatgtgcccggctggctcacctttgggtcaccgccgacacatccttgatgccgatggttatagagtcgcaaattcacgactggcgcacctgcccacgcacctatcctgtcatttcgagcgcataatttgctaccacatccggtcagggcaatcgaccttaatggcgtaaacggcacttctcaatacgtaaacggcacttattcttggctcccctctcagagaggggagccaagaaatatcaagctcggcctcccaggagagagccagaataatgcaccagcaaggcattaggatggagggcatgagcgatttgaacgcgttgaatcttgagcccggcgaagtggttggtgggtatacgctgatctcccggctcggctcaggagctatggggtcggtgtggcgggtgcgcgacgacggcggcaccacctatgccatgaagattctgcgcgactccctgaccgacgagtcagtggcaggctccggctctgcgtccacggccctgcacgaccccgacctcaagcccgatgtcacgccgcgcgagcgcctgcggcgcgaggccatggccttgaagaagatcaatcatccgggtgtgtgcggcatcgtggatatggaactcgacgatacgttggcgttcatcgtcactgaactcatcgagggcaagaatcttaaggatgatgtggccgccaatggccggtatgtgggcgacgatctggaacgcttggcccgcaagctcatcgaagccaccaaagccgtacatgcggccggcatcgtccatcgcgacatcaaacccaccaatgtgatggtgtcggccgccggaccggtattggtcgatttcggtatcgcgatgggcgagggcgaaagtcacgtgacccgcaccggcctagtgatgggtacacccggattcatcgcacccgagattattgacggtgccgaatccgacgacgccaccgattggtggtcggtggcgtccgtgctcgcttttgccgcaaccggcgcgcctgtgttcggcaccaagccgatgatggcggtacttgagcgcgaggcctcgggcaacgcgaatctttccggactaccggccggcacattggctgccttccgttctgcactggacccggatcgcagggatcgttgcacgccggatcaattgctgaatgccatcgccttggatgcgttgaatcccaacgcttggcagggcgagcaggcgggaccgttcgccgcgggagccgtggctggacaaccggctgcgatcgttgccgaagccgcggaggcgatgcccccttttggcgcggccggcggcgttgaccgcaataatccccgaaccatctggcgcgcggccgaggaagccgctgaggctcccaccatggccgtgttctccggcaataagggcgataacggcgatggcgaaaccgccgtattctcgccggctggcgccgctaccgccacgctgcccttagccgatatgccgccacgtccgccggccggtgcggagcaggccacgcaactgttgcccgacgctgctgccgatttcaccgacgacgccggcacacaggtactcaccggcgcgaccacaccgatgccggaccaaaccacgccgctggccgagcgcaccaccgtactccccacgccgcagccgtcatcattcccgccgttcggcaccgcccagagcagctgggatcccgcaagcaaccagcccacagcggtggaccccgccattcgcccggcattgcagcgcatcatcgaccaaaccgcccaagcggcccccaccgaaaccatggtccaaaatcctcccatgcccaatccggtggacgtgaagcgaggggaatatctgcagcgcggcaccctgccattgatcctgctggcggcgccgctggcggcactggcggcaaatgctccgctcgtggccatcatcgcggccactgcgttgttgtggctactgctcaccctggcctataacaccgaaccccagcttgagcgcgagggcaaacgcggcggcgagcgcaaaagctccgattcgtggattcgcgtggcgacttttccctggcatctggtcaaagccctgctgctggccattccccgcatactgctgctagtcatcatctatatggcgggaaccgccgtggccaccgcggctctggcactgcccgttcacaccatctcctggtatttcaccgcggattggggtattccggtgccgttgctcaatgatgtgccgttctccgcttccgggctggcgctgggcggtttcatggccatcggctggctggtcactgtgttcgccccacagtcgatgatgattcggctggggggcggcgtactgcgcgggctcaaacacagtcgcccggcgggcgcgccatccaccgaagtgggtggggctccacctgctccagtggcgccggcgcccaagggcggcgggcgcggcaccgtgctgttcaccatatgggccatcatcaccgtggccttgtgcgcgatgccgattctgggcatgccgatcaactggatgccgttcgcctagagcggggcggaatctcacacatcagccatccgcacacatggccgttgtgtatccgatacgttcgttccgtcacacttttacagggaattcacctcagatcagctctgggcgcagtcctcctcaggcccggtcattatgatggggcccaaacattgaagcgattgcaaggggatagctatgtcagatccgaagcgtcaggccaagcgtgccacacgcgctgagcgccgagcggccgaggaggccgcccagcaggcacgggccgagcaggcagccaaggagcgtaagcagcagaccatcatcggctgcattgtggtggccattattgtggtgctggtggccatcgctggattcgccgtatacaaggctatgcggccgtccaacaccagcagcagtagccagcaaagcaacatgaccgtggacgaggcctatagcaagctcaagaaagtcagtacccagccggctaacgccgacgacaaggccggcttcgtaatctccaacaaaggttatggccagaaagccgagggggctcccaccgtatccatctacatggaaccgctgtgccccggctgcgcctcggtgaaccgccagctcgatccaacgctcgtcaagctgatgaacgccggccagctcaacatcgatttgcacttcctcaatttccaggacaacaagagctccgacaactactccaaccgcgtgttcaacggtgccatctacattgccgagcatgatgacgatcccgaccacctcatgagctacctctccaacatctacgctgaggatttccagccgggcgaattgtccaattacgagccggtaagcaacgccaagctggagaagcaggccgtcaaggccggcgtgagcgaggatgtggccgccgcggcgttcagcggcaagaacgaatacctcgactggctcaccgcctccaacaactacacgatcctgcgccccgaactgttcaacagctccggcgccttctcctcccccacactcaccatcaacggcgaatactgggatctgaagcagctcacgctggcggacacgaatatggtggacggcttcctcaagtccattgggctggatgctgaccaggtaggcgtggaaggcaaaatgccatccatcggtgccagcggaaagccgatttcggtcgcctcctgatgctgcgtggccgaataagttgacgccgcgacatatgcaataccgcctgcggctcggcttaaattgaccactcgggaagtaccggtatactagtcatttgttcgcaacgatttacgcgttaagaacaatcgcctctttagctcagatggccagagcggccgccttgtaagcggcaggtcgtcggttcgatcccgacaagaggctcgtcgcgcagaaaaaatggcgtattatgtgatacgtagacttttctacgcatataattcttaccttgggtaagtactccaggagccttcccccaattatgggcttcctggaatgagggcggagcgtcccccaaccagctccgcgccttcaagggggcgggaacatccccttctctcccgccccccttttcttttctttttttgagctcagaacaatctgacgagcaggaatggtgacggtggccggtgaaaccgcagtacgggccggaacaaccgttacgatgggtggcgtaatcgttcacccagcaggaagagtatggcaatggcacggcgttggaccccgcagcggtttgttacactgcgtcgcatccgcgtaatcgcctgtatcgcggcgaccagtatcgcgctggctggatcattcgcgttcaccgcgcgtaaatccgtggccctgaacatcaacgggcaaaccacccaagtcaccacatatgcgatgacggccacccgtcttctggaggaacaaggggtggatatcaagacccacgatatcgtcactacctcgtccggcgaccagctcgccaatcatgccgtggtcaccgtacagtccgcctaccagaccaccatcaacatcgacggcaccgccgtgccgttctggaccgtggccaccagcgccgaccagctactgggatttttcgaggaaaaccagaacaacgccgcgaagatcaccgtcgacatcaagaacgtgtacaaccagctcaccggcggcctggtgatcaaccagtccgggccggtcaccgtcatcgccgacggcaaaagctcggtggcccccaatggcaagctgccggccgcctccatcctcgattccaagggcatcgtgctcaacaaggaggatcgcgtcagcgttgagaaagacagcgacgagaccattctgcgcgtacgccgcgtgacccacggcgaggagacgcgcacgtccgtgattccgttctccacccagaccatcatcgacccgaatctggctgaagggcaagccgatgtgcgccagcagggcgtcaacggcgagaagacgcaggtgtacgacgtcacctatgtggatggcgtggccgaatcggagacgctgaaatcggagaccgtcacctcgatggccatcgaccagatcatcgccgtaggcgccgccaagtctgataccgataaaggttccgataagaaatccgactccgccgataacggcaaggccgattccggttccaacaatcagcacgagtcgtccaacaacaatgccggcaacaccggcaattccggcaacactggcaacaccggtaacactggcaacactggcaactccggcaacaactccggcaactccggtaacaccggcaactccggcaacaccggcaacaccggtaacaccggcggcggtacgaacaacaattccggctcttctggctccgattcaggcacaaccaccacgccctccggccgcctgtggcacgccaccgtagcccaggctcaggcctatgccgccggtgccgccgcgcagcgcgggtggacaggcaacgactgggattgtctggtcaaactatggacccgcgagtccagttggctgtggtatgccgaaaacgcgagctccggtgcctacggcattcctcagtcgctaccagcagacaaaatggctgcgttcggtgccaattaccgtgacgatgccgccgtacagatcgattggggtctgtggtacatcgcacaagcctacggcagcccgtccaaggcatggcaacattccgaacaagtcggttggtactgatcggttacgaagcccacaaggaacacacgcttatgaacgacaccattcccgccactggtcacctgttaggtgccgccgatatccgtcgtatcgcggccgatgccggcatcagccccaccaagaaattcgggcagaacttcgtcatcgaccccggcacggtccgtcgtatcgtacgcgaggcgggagtgaccgctgccaatcatgtcatggaagtcggccccggcctgggatcgttgacgctggcgattttggaaaccggcgccaccatgaccgcagtcgaaatcgatccgccgctggccgaacgactgccgggcacagtcgccgaattcatgcccgaagccacgtcacgactcaccgtcgtcaatcgggatgccttaaccgtcaccccggagaacgtgcctgatttcagcgatgacgcatcgtttacgctggtcgccaatctgccgtacaacgtggccacgccgattctgctcacgctgttggagcgtttcgacaacctcggctcgttcttggtgatggtgcaaaaagaggtggccgacagactcgccgccaagcccggttccaagatctacggcacgccgagcgtgaagctcgcctggtatggcaccgccgaacgggtgggcaccatcggccgcaatgtgttctggccggctcccaatgtggattccgcgctcgtcaaattcacccggtatcaggccgatgacccggctgccccgggaactgcgaacagcacagacgacggcacacaacgggaactcgtatttcgtctgatcgatgcggcattcggtcagcgtcgcaagaccctgcacgcggcattgaagaccattgcgccctccgaggcattctccatcgccggcatcgatccgacccgtcgaggagagacgctcaccatcgccgaattcaccgctctggccaaggccatcgaatcgtgtggagatggagatgaggcacaatgagtccggtaatctcacatccacgctcagccgctgcccgacatcagtccgatgagctctcccccatcaccattacggtggattgcccggcgaaaaccaatctcaccttggaagtgggacctgctcacgacgaatggggcggacgccacgaactggacaccatctactgcgcaatcggcgtatacgacaccgtcaccgcaaccgccaagcaacccggagcaggattctctctggagctcgaaggcgcttatttgggcgacttggcctcctcacgcagcgacatgcgccgcaaccatgcggtactggccctcttcgccatggcccaggcggccgagcgcgagccggatgtggcgttgaccatcaccaagcgcattcccgtgggtgccggactaggcggcggttcagccgacgccgcggcgaccatgctggcggtcaatcgtctctgggagctgaactggcccatagagcgcctgcgcaccattgccgccacgttgggcgcggacatgccgttctgcctgaccggtggccttgcatacggcaccggtttcggcgaacgcatcacggatatcgcccccggcagccgcgatgagctggcgctgatagaacagggattcagcggcgaagtattggtcggcgcataccagtcgcaactcagcactcctgaggtctaccacacctttgacatcgtgggagccgcagaaggcgaccgcaatcatctgcaggctgcggcaatcagcctgcatccccgcagcgggcaggccatcgacgccgccacgcaggcgggtgccagccatgcattcgtctccggatccggcccctcagtggtcgctttcgccgccgacgaggcagcggcacaacgcattatcgaggtgtggcgcgatacagctgtggtcgatcgtattattcgagccaaatctcccgaacaccccaatatcagcgtcagacagtgacgctaaggtagcaaccagccacccgacccatgaaagaagtccaccgatgacgtatcaggttgatgaacgtgaagcccgcaaggcgtacgtgcgccgccgccagaccatcgtcttttccatcagcggcgcggtattggcagtagtgctggtcatagccctactgttcaatttccacgttttcggcctcggcgaagtggagactccggccagccagccgaattacggcaacgcggcgccgtgcgcggtcaaggatagcagcggcaaagcgcaatacgtgtccaacgcttcggtcggcattcgcgtgatgaacggcacctctcacggccaattcgccaaggccgtgggtgaagctttggccaatcgtggattcagcgtgcagaaaatcgataactattccagcaccgacgttgaacgcaccaccatctacttcggcaagaacgccattaatcaggcgtatacgctgatcggcaatttcaccgacgccaccatgatcatgacggctcgcgaggatcagctcatcgatgtggtcatcggcgccacgttcaacgatctgcaggacaccaactcctccccgcaatccggtaagaccatcaccaatatcgagggttgcaaggccgccgatagcatgaccaagctgcccgccgacaccaaacacgacgcatacacggcgcagtaaggcgcatacagcttcatcttcgcgaaaaaccgtacgctgacacgtattcagcgtacggttttttggtatcggactagtatcggactactgaatctcggcgtaccagcgcttgagttcttcgacggccacatcgtggtccaccggaccgttatccaagcggtattccagcatgtgcttgtaggcgcggccgatcatcgggccgggctccaggcccagcaactccataatttcgttgccgtccagatccgggcggatcgcgtcgaagtcctctttcttcttgagttcgcggacgcgctcctccatctcatccatggcctgggagaagatcatcgccttgcgcttgttttgtgtggtggcatccgcgcgcgtgagcctgttcagccgctcatagaggtgcccggcatccttgacataccggcgtacggccgaatcggtccacggctcgtccacatagccgtggaagcgcaggtgcatattcaccagttccgagacgtcctcgaccagatggtggtcaaaacgcagcgccttcaaacgcttgcgggtcattttggcacccaccgcgtcatggtggtggaagctcaccttgccgcccggctcgaaccggcgggtcttcggcttgccgatatcgtgcatcacggcggccaagcgcagcgtcaggtcgggggcgggcaccgggccgtccgggccggtttccagggcgatagcacgttcgagcacaatcatcgtgtgctcgaagacgtccttgtggcggtggtgttcgtcgatctgcaattgcagggccggaatctccgggaagacgatgtccgcaagaccggattcgaccaacgcctcaaggccggcgcgcggacggtcggagagcagcagtttggtcagttcgtcgcgcacacgctcggcggatacgatgtcgatgcggtcgcgcatcgaggtaatcgcctcggccgcgtccggcgcgatacggaagcccagctgggccacgaatcgcacggcgcgcatcatacgcaacggatcgtcgtcaaaggactgtcgcggatccaccggcgtgcgcaacacgcccttggacagatcactggcaccaccgaacgggtccacgaattgcaggtcgggcacgcgcagagccatcgcgttgacggtgaagtcgcggcgggacaggtcgccctcaagcgtgtcgccataattgacctcgggcttacgcgagtccggatcgtacgtgtcagagcgataggtggtgacctccaccttgacctcggtgccgtccgggcggcggcgcatggcacccagcgtgccgaacttgcgccccatgtcccagaagccgtcatgcccccaccggcgcagtatcggctcgaactgctcaggccgtgcggatgagcagaagtccaaatcgtggctctttctatggagcagcaaatccctgaccgggccgccgaccaatgccagctcgtaaccctgttcggcgaacagtcgaccaagttcgatggcttcaggccatacttcgaaatccaatgggcaccttcccgcgtgcgacgtttttctgccctaccagcataccgttaccccacctgcacacggggttgagtaaggtggagaatatgattacgcccgccgaccttgcccgcatgctggggcaaacaccagattcggcggatagccatacccaagaccacctgctgtatacgtccgaaactccgcatcattccgccgattcgggcgattcttccgatgtcggcggcaccgcgagccactccaccaatcaggccgttcatcaagacgaagtagacgcagtaccgactgcgcaacattccggtgtgcctggcacacccgcaacgcccgccacacccgaaccatccgaatccgaaatatcggacgccgccagcgacatgcccgcaccgaagccgatgatgcccacaccggccaccgtcttcggcatgcatgccaccgtcaccatcgccactaccagcggcactatcgaggggcaggctgatggtatcgccggcgaggccggtgccgagacgattgccgaggtcgagccgattatcgccacggcacaaacgtccgtaaccatcgtcacgaacgatcccgcggcgaccgctcacgcggccgtagatgctgccgttgcggtcgccaaggccgccgccgcgcacaccacagcgataccgactccgcgcgacgtgctgatgccgcctgcggcacgtaccgcaccggccgcaacgccggtcaccatgccggtctcagcgccgtctgcagcaccagtgaggcccgcaacgtcagcgcatcccacgccggccacggtcttcggccggcacccgtccggagatgttgcctcgccggaaccggcagtgccggtagaaccggtgacgccatccggcccgactccggccatgatgccgcaacgccgtacgtcggacggtccgaccacattcgcttcactggatgcccaggaactgccggtcgtacgcgaatattcggcaggcggtctgattttcgatgaccagaaccgcgtggccattatcgcccgtcattcccgctccggccatctcgaatggtgcttgccgaaggggcatatcgaaaaaggcgagaccccgcagcagaccgctgtgcgcgaagtgcatgaagagaccggcatcctgggcgaggtgatcgattccatcgccaccatcgactactggttcaccggtaccacgcagcgcgtgcacaagctggtccatcacttcgcgctcaaacagaccggcggtgaactgacggtggaaggagacccggatcatgaggcggaagacgccatctgggtgcgttttgaagatttggatgacgtgttgagctatcccaacgaacgcaaaatcgcgtggctctacgccaggaagaagaacaggcaggcaaacgagtgaacctacccggagtcttacgacattgcacacgtctggcacacgcactggcggctggcgtcgccgttgtggcgatgctggccgctccattgaccgtctacgcgaacgatacgacggacacgactgattcatccgatacgacggacgcaacgggcaatcagaccgagaatcagcccaagcagagcattgccatcacgcaaagcacccccatcgtcacctccaaatcgggctatcgtgtcaccgcggtcatcagcaatacggacagcacggccacgtcaagcggcacactgcacctgaccaccaatgcgttgttcacctttgtctcgcgcaccgatattcagaattgggccgagaacaacgcccccatcccaacccccaacgagttgggttccgttgacgtgccatcgattcccgccggcggcactgccaccgtcaccatcgaggtgaacgccaatcagcagacccttgcctccatagggagttggggaccgaaaccgctgatgctgtcgtatatcgttggcaatcagatactcgccgatttgccgagttttctgacccgatcttcggatgggctcaacaccgcgacaacaccggccatgaacctgaccgtggccatgccctacaccgccagcggctggcaggtcgataataaggccatcagcaatcgcattgccgaaaccaccacttcctcgacatcaacatcgtccaagtccaacagcacggacaaggccgacaagtccgataacgccgacgccagcaacgcggccaaagccactgatacgcaagccatatccttatccgaacaggatgccgataccgcgcgatcccttgggcagacattcgccaagcaccgctcgctgcaagtgatcgcggatcctctgtattggcgtcagtccgcagtgcaaccgtccattgccggcatcatgcagcccgccgacttcgacatcaccgcctataccgcactggacgataccgcggcctacgaaaaggccggcatcaccactgagcagtggaacgccaagcaggcggccgcatggtatgccgacggaggcgactccgaaacaccctccgcgtacgcatggcagggcaacaactgttggacgttggatgcgctgaccgcagcacgcgagcagggctatgacacggtgattgccgatgcctctttcgatgccgaccagactgaagccgtacacacaggcacctacgtggtgcatacgcctgccggcgatgtcaccgtgctgaaggagcaatcgaccttgggcacgctggccaagggccaagccaccagcacggacgcgcaggccgagtccagcgatgccggtcggttggcccgactgatcgctcagagcgcgttctaccagatggaacagccctatacatcccgatacctgcttatgacgttctcccgcaccacggaggccagctggatcgatcaggtgatgagcgccttcgagcaggcgtcttggttgaatctgacggacctgaagaccatggccaaggccgatccgtacaatgtcagcgattcggtcaatcccgacaaggccgatgatgccaacaccgccaatacccggtcggcattgagacagttggccgacagccggcatgacatcatgcgcatggccacctccatattgaggaacgagattgattccgacgaggtctcgtcgttggacccgcaggccctggcccggcaggacgccaatgacaccgcctcgcatagcaacgatccgacgcaatggattggctctttactggcgctgcatgacgatatggcgctgcggtccatgtctggctccccccagccgacagccacgcgaaaagccatggtcaaagccacgaaaacactggccagcgatcttctgaacggcgtacgcatcaacccatcggaatcaatatccgtgttcagcgaatccgcgaaaatgccaatcaccgtcagcaatgaccttccctacgccgtcagcgtgcaggtcaactcactgactgactccatgcagatcgtcacctcgcgaaccgctgacatcgatattccctcgcatagcgacgctcaggtgaccttcaccatccgcgtttccacttccggctcatcgacggcccatgtgtcgttgaccgaccgggaaggcaacagcttcggcaacacgcaggacaccgcgatcaccagtgtgatgcgcatcagtgatgccagcggcttcattatcatcggcttcgccgtgctactgggcattatcggcctgtggcggcagttccatcggaagaaggaccccgacgaatgagttcaagcgtaggtcgtaattccctgatcatggccacgggaaccgctgcttcccgtgtgaccggtcagctccgcacgattcttctcgctgcggccatcggcaccaccggattggcggccaacgcctatcaggccggttccatgattccccaatccgtgttcacgctggtgtccggcggcatcttcaacgccgtgctggtgccccagatcgtgcgcacgttgaaagaaaaagacgcccaagaacgactgaatcgcctgattacgttggccatcggcatcctattggccatgaccgtggtgatggcggcggccagccctctgcttgcccgcctgtacgtgggtagcgacgatcaccagatgatagccctgaccacctcgttcaccctgtggtgcatgcctcaggtgttcttctacggcctgtatacggtattggggcagatcctggccgccaaagaccatttcctcacgtatgcgtggagctcaaccggtgccaacattattagttgcgccggttttactggctttattctgctgttcagcaaggccaatgaacagcccctcgaattctggaccgccgacaaaatcgcgcttaccgcaggcacctggactttgggcgtggccttccaagcgctgatactgttcctgccgctggcccgtatcgggttcaagtacaaacccagcttcgggcttggcggctttggactcaggtctatgggtcccgtggcgttaggctctttgggcgtggtgatcaccagtgagatctgcggcattatccttacccgtatcgccacatccgcaccgcagcgcgcccacgaactgacgggtgccagcctgttcagcgtggcaggcaacgcgacctatcagaatgcgtacacactgttcatcctgccctattcgctcatcgccgtatcggtatccacggctatgttccccaaaatctcccgttccatcgcagctgcgaatctggatgaggcacggcacgacctggtcagcgcactgaataatgtgggcctgctcatcatgttcttcgccgccgccatggtcgtgttccccgaaccgatcatccgcgcattgcttccgtccgtctcgatggacgagactatgttgatctcctatgcgcttatcgccttgtctgtgggcattccattggggtcggcgttcctgttaatccagcgcacgttctacgcctttgaggacggccttcaccccttcctgtccgcggtgatgcagtatggattcacctcaatattcatgatcatcggcatgatggtacttcctcctgagcattgggtactcggcatcgcctgctcggtgaccctcggtggattactggcgttgccgctgacgttgatgatgttgcgccgcaagttcgaaggcaatcttggcggtcgggagatcacgaggacatatgccaaggccattgtggcggcactggcttccggagttgtggtctggctgatcaaacgaccggtagtcgcactgttcggcgcggatattcgaccagtaggcgggcacatgagctggtggtctgcgctggccatctgcgtggtgctcaccattgtgctggccgtagtatatgtggctgtgttgtgggtggtgcacaccccggaactcatcagcgcctatcactcgatactggcccgtctacacaagactccggccagtgaggacgttgctgtgacagcccagccggaaaaaagtcgacgatacgcaaatcaatcctgagacggagcccgtcaaggatagccccgcacgtagaatatctaagaccagtctcgaacaccaatcacacggagccgaacgcactatgaaaccgcaactcggagacacgattctcaaccgatacaccttggtgtcatcgttgcgtgaggagcctggcattcaggcatggaaagccaacgaccgtgtgctggcaaaggattgccagctgttcatcattaccaatcgcagcgctttcgccgcaatcgatgagctcgctggtcgcatggccgccactcgccctgatcgtgtgattcccgtactgaaataccgtatggaatccgacgtacttctcattgtcatgccggtggatagcggccaatgcctgactgactacatggtggataccgccaagccgctcagctacagcgccatccggtcgattatcggagaatgcgccaacgtgctgcgcgaggtcattgcggatactcccagcggcatcgtcatcacaaccgacaccgttcgagtgactacctccggtgtgcaaattgccgatgcaccatgtgccacgatgctggccgatacgtccgctaccgatctgcgtacggacggtcctgaacggtatgcgattcgccagcttgcggcattactctataccctgctgacacgcacgccaagccaagcgacacccacattcaatctgcgtgccttgccgcaagacacccctggcgaattccgcgtgatttgcaagcgtggattggccttgagcgagcccgacgagcatacgttgccaatggcagcccttgtagaactcgacgccttgttgggtaattggaagccgctctctgaactgagcgatgctgatattgctttgccgagcgtggaaagcgattgctcgattaccaaggcgatactgaagcctgccaacgagactgatatcgtgcctattcccagcacgttgattaacagcaacagtcttccggaattgtctattaccccttccctgccggttcagccggccgccgtccccgctccgcacgcgatgtcaccggttcctctgcctgatgggtccagtactgctgacggtaaccagtctcagtctgatgcccgccgtctgtttgacttcaacctttctgacgcctgggagcacgaaaatctttccggtgaaggcaccggtgactggtacagcgaaatgaatccggcccccatcggcggtccgggtgataatactcggttgacagtgcctattgttaccggcggtattcccgatgccaccgcgggagagacaaccagtcgtattcccgtgttcgacgccagcggccgtgctgtggctcccggtgaggaatcgctgcgtgccttggaagaggagcaggcccgcattgccgaagtaagcgccattcctccgagcttcacaccgaaggatgtgccggatgacgaggttgacagcaagctgcccgatgaacatctgttcggcaaactgtcgaccaaggtcgttgccatcattgtggctctgatattggtagtggcagcggctgtttgggcagtgcatgcgttccgatcctccggagacaatcctgccgatgcttccagcaactccagtgaaggtgactggcctgatatcaatgctgacgctgtgccatttggtggcagcgagaacgcgacgaacggtggcaccactgacgattcttcaaaatcgagtgatgccactcagagcgaatccaaggactcggcatcagacaagtccaagaagtccgagactgctgattcgtcgtccaagaagaccaaggccaagaagtccggcgataaggattccagcgctgttccgcaaccgagccatgagaacaacacggcgtttacgatttccagcgccaacttcctgtcgaatcctggcggccaatccgggtacgcatactacatgcaccttgaccagccgcaggatgcgtaccgcatggttatcaccatccgcacatccggtggtaagggctatattcgcgcaaataccactggagaccccactcagggcgagcaggtggccgaattcacctttgctgaaggtggcactactgaggtgaagttcaccaaagccgtcaatacgcaggatctgctgctgtgggtgccatcgggtagcctgccgcagaaccagctgtacatcgagaaggtggaggtcttctaatcggcatctataccgataactgacccaagaaggggcggtaccgttcgcatacattcgacggtgccgccctttcttcgcgtctggctgaatgacatggaatatcgtatgggggtgtgacaatgtttcacgtgaaacataacgtcatcattatcggttctggccccgctggctacacggccgccatctatcttggccgtgcaggtcttaatcctgttatggtcactggtgcgttgtcgccaggtggacagttggtcaacaccactgaggtggagaacttccccggattcccggaaggtattcttggcccggatcttatggatcgcatgaaggaacaggccaagcgcttcggtacaacctatatcacatacgatgtctcttccattgaggcgtgtgagagtgattcggtcaagccgacctatcgtgtaacgctctccgatgactcccaattggaggcatcgtcgcttatcatcgccacagggtcgtcattccgtaagcttggggtgcccggcgaacaggagctgtccggacatggcgtctcgtactgcgccacctgcgatggcttcttcttcaggaacaagcctatcgtggtcgtaggcggtggcgattcggcttttgaagaggcattattcctgacccggttcggttcttcggtcaccttgattcaccgacgcgatagcttccgtgcctcgcagatcatggtggaccgagccaaagccaatccgaccatcaccctactgaccaacacagtggtgacctccattaccggcacctcctcccccacacagaacaccggtgcacctattgccattcctggcttgacaatcaaacgaccggctgtggcaccggccagtgtcagcagcattgccgtacgtaacgtggtgaccggagaagaaagcacgctggacaccaacgccgtattcgtggctatcggccatacgccagccactgattttgcagctggtgttgtggaccgcgacaatgatgggtatgtcgtggtgcagggtgccagcacggtgaccagtgcgccaggcatctttgctgcaggcgattgcgtggatcgtacttatcgtcaggcaatcagcgcagcgggcatgggctgccgtgcagcgctggatgcgcaggcctatcttacggactgattgcggcgacctgatgatggcttgctgttctggctgctgcctgtgacataggagcaacgctaggtcagtgttacagcatgccgcccttggatagtacgtatcggtcaaaggcatagaaagacccctcaggcgacggagaatcacgatgtgtgattgtccctccagcctgaggggttttctattgcgacaggggctacagcgcgggcatacgcccctgccaggaatcacgcagaggctataacgtcttgcgcatacaacgcactgcacagcaataatgccggcgacaacacgaatgttcttatcgtgttacacccatttggaatcggcatcgccttggctcggcaccagcagctgcaggatgcgatccatatcctctggtgacgaaaagacgatttcgatgcgaccatgcttggtgctgcccttaatcgacaccttggtatcgaaatgattttccaaactctgctggatggcggaaccaacccaaggattggtcttagacgtcttaggcttcttcggctgctcccccgacgcaatcttcatggcgacgatttcttcggtgctgcgtacagaaagaccttccgcaataatacgagaagccagcttgtccatttcctccggatcgctcaggcccaatagcgcacgcgcatgaccggacgatagcacaccggcagccactctcttttgcacagaagccggcaggttcagcagtcgcaaggtattggcgatttgcgggcgagacttggacaccgacttggacagttgtacttgtgtcaacccgaactcttcaatcatctgctggtaggcagccgcctcttccagcggattcaaggccacacggtgcaagttttccagcaatgcatcgcggagcatatcatcatccgcagtggttttgacgatggcgggaatcgtctccaacccagccaactgagaagcacgccaacggcgttcacccataatgagctcatacgggctgtccaaatgaccggcaaacggattcgtgctggattccgtctcgtcgtgcttggcggctttggccgcagcaatctggcttgccggacgcttgcgcacgactatcggttgcagcacaccaacttccttaatggaagcagacagctcattcaactcatcctcgtcgaagatggtacgaggctgatgtgcattgggcccgatatcagacagtttgagttcagccagataaccaccggctaccggcttgagctcgtccttcttatctgtgtcagcggtctttgccgccgtcactgtcaaagatgtttcacgtgaaacatctttgacagtgacggatgtacgatgtgccgtctgagacgcagacgacttgccgccctgctgaggtgcggcgaccttaccggtttgaggtttctccgtaccgaaaaacaggtcgctaggatgagtaatggtgtccaatgcgggcatggatgcgcgtttaccggcggctttcttgactgccttgctggacgatatcgtctgaggcacggcaggttttgattcctgctgggcagtagccttcttggcgggggttatgtcagcagtggcctccggagtagacgaatcctccgcaatcattgcgggctgctccgccaccggctcctcccctggcaatgtggggaacaaagcgccaaggcccttaccaagtcgtgattttgatgccattacttgttcctcctcgcatcaatggtgtcaaggacttgttgcgaacgctgtgcgatttccaaagctgcttcaccatacgatatggcacctatgccacgaggatcataggcaatcaccgattgggagaaactcggcgcttcggagatcttgactgaacgcgggatggtggtattcagcacaatgctgggatagtgtcccttaacctcgttatatacttcacggctcaataacgttcggcgatcgaacatcgtgacgagcatggtggacaccagcagtacgggattgaaatgctcttgcaccaaaccaatcgtgttaatcagctggccaagaccctccaatgcgtaatactcagcctggataggaatcagcatctcggtcactgcacacatggcgttgatgaccaagaggcccaagctgggcgggcaatcaatgaacacgtaatcatagtgtttatctgattgacgtaggtagaggtctagggcctccttcagcaacgtgtttcggttgggcagatcagccacttccaactcagcaccgctgagatcgattgatgcaggcacaacatcaagtgtgggaaaatcaggacagaccgtgataacatcacccagatcggaacgcccctcgataacgtcatagaccgagggctctcccgatgcatgagatacacccaacgccgtagaggcattgccctgcgggtccatatcgatgaccaacacctgcgcgcccttgttcgccagcgccgcagcggtgtttaccgtggatgtggttttacccactccccccttctggttggccacggcgatacgacgagtccgttgaggctttgggaaatcggttttcttgagtacatcgtagcgtgagctttcatcagccatttggctaccaagcactgaaccgtgaccatcgaatattcgctgaagcgtttcggaagccgattctataggttccgactgatgatccttggtggccatcgctcctccttgcacagacgtaagttccagtgttctcattcgtatggacatgatgctcgttatccacaattgcgatatgcaatgtggataagtgtggataagtgtgaatgacgttgagtgttagattgtgtattcacagacgaaaaacattgaaaaatcaatgttttcatcattatgcacatcgtcccgtaaaaatgtggataacttttacgcacatatggaaatgtggataactcaatcagtactccactcatcgcttatccacaatcaccacgtgggtaggctcaagatccggcccgacagccgcctcaacgacacgtggacgacgaccaccgaattttgcaatctccttgccagccttgtcgatttcagcctgagcagaccgtcccttcagtgcgatcaactgtcctgacggtttcagcaacggcaacgtccagccagagagtttggtcataggagcaaccgcacgacacgtgacaacagcgaacggatgaatttcccgcttccgtacctgctggatgacggcatcggagcgtccacgaataatctcaacgttctgcagttgcatcaggccaacacattcatgcaaccattcgattcgccgctccatcggttcaatcagcgtgaagtcatgatccggcaaacacgcggcagccaccaatccaggaaaaccaccaccactgccgacgtcggcaactgttttgaagcgaataccattcgtcgcattccgaacgtacggcacaatcgcagcggaattcagaatatgccgttcccaaatgatatcgacgtcacgggggccgatcaatccacgaggttcaccctcttcggcaatcttggcatggaaacgctccaacttcggcaacgcatcacccaagacctcagcaagtacaggtgacccctgcagctgatccgtcatagccatctccctcaccatgtttcacgtgaaacaatcaacatggagaatggcgccgctcattacgacgccattctccatgcggtcactttagtttgttcaaagacgacatccgtcgaacgtccctgtcatctcaaaaaaactcgccgagcaattactcctgatcaagctcgtcgtcttcggcggtatcctcgactctattcttgagatacaccgtcacgtaacgatgaggctcctcaccgtgcgagcgagacttcagcccctcttcccgaaccacatcgtgaacgactttacgttcgaaggaattcatcggcttcaagtcatacggctcgccggaatccttcactgcgtcaatggcatccaaggcgatatcacggaggtgctgacgcttgcgcttcaggaaaccgtcgacatccacaatcagatgagaacgctcgccggtcttctgctgtacagccagacgagtcaattgctgcagagcatcaacgacttcaccattacggccaataagatgtttgatgtcagtatcgtcatcagcaacgatttgcacggtggggcggtcattacgcacgcccatctcaatgtcgccctcatagtcggcgatatccagtaggccttcaaggtaatccgcggcgatgtcagcctcttcgttgagctggtcgatcgacttcacgtcatcctgtgccatacgctactccttcatgtcgtgtttgaattccaagtctaagccctgctcccccgaacagagaaagtaatgtcggtgcgtgttgaatgtttcacgtgaaacatcgaactcgcaccgacatagtcgtcacttctttttgcgcttacgcacgggctgttgacgctgatagccctgagtggccttacgctcggcctcttccttggccttggccaatgcttcttcttccagagagggcaggccggcctttgcgcggcgagcattctcattacgatgatcgcgcttctccttgtccgccgcagccggagagccaggggtcgggaatgcgtacacctgccacaatgtgcggcagaggttgcacacgttgttggtcagccagtagaccagcacggcgaacggcatggcgacaccggagaagatgtacatcaccgggaagagccacagcatagccttctgcatggtctcggtctgcttgttcatcgaagcagctgccatgttgcgcttcatgctgaagtactgcataaaccacaggcagaaacacatcaggaacacgaagataccgatgaccgccttgccactagcggcagcactggtgaagttatcggtcacgctgacaatgccgaacacatcggtttgggtgaattgcttggcggttgctacgtcgaacgcgcccaacgcatcgcgtttaccgttggcaatgtatggaatggccgacagcgtatagaacatggacatgaacaccgggccctgaatgagcataggcaagcaggagccagccggattgacgtcattgtcttgatacagtttcatggtttcacggctcatggcctccctggaagcctgatccgtcttgcctttgtacttgttctgaatacgctgcatcttcggcgccaatgcctgcatcttgcgcatcgacttcatctgcttgtagaacagcgggaagatacaagcctgcaccaccagcaccaggatgataatggcaagcacccatgagacaccaatcgggctcacgcccagcatcacgaagaagtcatgcacgatcttcatgatccaggtctgcaaccactcaacgggagtcaggattttatatagaaatccccaaaacccgctatcaagcagaaattcatttgagttcatcgttgggcctctctttgggttgtggccaatggtgtcagtcgaggctcttcatgagccttcgaccacgaaaacctgtaaaaaacggaataccgttgtggaacatcgtcgattcccccacgactccacggccggcaacgcagtaatctcagcacggcgagcactccccctttgaacgcgccataccgttccaatgcctcaatggcataattcgagcacgttggataatacttgcaacaaggcggtgtgtttgccgagatgtgctgttgataccagcgcaccccaccaatcatcaccgccttgaaagaagctgtcatgcctcagccaccttatgcgccaccgtggcaaaagccttcgcgatctgctgatctagcgaagcgaacgatgcggtcgctgcactgggcttggcgcgcaaaacgatatcgcaatgcgcgggcagcagatcctcatgggctctggccaatacacgaaacctacgcttcaccgtattacgggtgaccgcatgtcctaccgatttggagacagctaatcccaaacggcgatgcaccgtccggtcgtcatcatcatgatggtcgtcgggcaccaaatagtgcacgacgatatccttgccacctgctttgcgccggcgtttcagcacggtgacgaaatcacgatggctttgaagcctctccacctcgactatgcctgtggcactgatcggaatgatcaggcggagagggtcttgcggcccttggcacggcgacggttgatcaccgcacggccagaacgggtgcgcatgcgcaggcggaagccgtgcttcatgtggcgacgacggttgttcggctggaacgtcctcttcataatccattgctcctaggtctattcggcaacgcttcgcgctgccctcacgtgagtcaagctataccaaagtactctcacccctaccctcaagtcaaaacggacggagtattttcacatttcgacacgttgcgagacacgccccaaatctcttataatcggcggaataccaaccattcacggccaaaagttatccacaaattacatgtttgttattcacaatccagttatttcaacacgcgacacggtggataacttgtctaaaccagagtaaatattatctgttgtacgtatttcgccacagcgacagaaggggccacc
